United States Patent Application Publication US 2019/0002960 A1 - sequence listing, part 6

SEQ ID NO: 6 - DNA, 2799802 bp, Staphylococcus aureus strain MSSA476 (residues 1-1,399,901 of 2,799,802)
cgattaaagatagaaatacacgatgcgagcaatcaaatttcataacatcaccatgagtttggtccgaagcatgagtgtttacaatgtttgaataccttatacagttcttatacatactttataaattatttcccaagctgttttgatacactcactaacagatattctatagaaggaaaagttatccacttatgcacatttatagttttcagaattgtggataattagaaattacacacaaagttatactatttttagcaacatattcacaggtatttgacatatagagaactgaaaaagtataattgtgtggataagtcgtccaactcatgattttataaggatttatttattgatatttacataaaaatactgtgcataactaataagcaggataaagttatccaccgattgttattaacttgtggataattattaacatggtgtgtttagaagttatccacggctgttatttttgtgtataacttaaaaatttaagaaagatggagtaaatttatgtcggaaaaagaaatttgggaaaaagtgcttgaaattgctcaagaaaaattatcagctgtaagttactcaactttcctaaaagatactgagctttacacgattaaagatggtgaagctatcgtattatcgagtattccttttaatgcaaattggttaaatcaacaatatgctgaaattatccaagcaatcttatttgatgttgtaggctatgaagttaaacctcactttattactactgaagaattagcaaattatagtaataatgaaactgctactccaaaagaaacaacaaaaccttctactgaaacaactgaggataatcatgtgcttggtagagagcaattcaatgcccataacacatttgacacttttgtaatcggacctggtaaccgctttccacatgcagcaagtttagctgtagccgaagcaccagccaaagcgtacaatccattatttatctatggaggggttggtttaggaaaaacccatttaatgcatgccattggtcatcatgttttagataataatccagatgccaaagtgatttacacatcaagtgaaaaattcacaaatgaatttattaaatcaattcgtgataacgaaggtgaagctttcagagaaagatatcgtaatatcgacgtcttattaatcgatgatattcagttcatacaaaacaaggtacaaacacaagaagaatttttctatacttttaatgaattgcatcagaataacaagcaaatagttatttcgagtgatcgaccaccaaaggaaattgcacaattagaagaccgattacgttcacgctttgaatgggggctaattgttgatattacgccaccagattatgaaactcgaatggcaattttgcagaagaaaattgaagaagaaaaattagatattccaccagaagctttaaattatatagcaaatcaaattcaatctaatattcgtgaattagaaggtgcattaacacgtttacttgcatattcacaattattaggaaaaccaattacaactgaattaactgctgaagctttaaaagatatcattcaagcaccaaaatctaaaaagattaccatccaagatattcaaaaaattgtaggccagtactataatgttagaattgaagatttcagtgcaaaaaaacgtacaaagtcaattgcatatccgcgtcaaatagctatgtacttgtctagagagcttacagatttctcattacctaaaattggtgaagaatttggtgggcgtgatcatacgaccgtcattcatgctcatgaaaaaatatctaaagatttaaaagaagatcctatttttaaacaagaagtagagaatcttgaaaaagaaataagaaatgtataagtaggaaactttgggaaatgtaatctgttatataacagcactaatgataacaatcattttttacatttctatatgctaatgtggcaagatgagcaaaactcattttgtggataatgtttaaaagtcatacacaccatacacaagttatcaacatgtgtataacttcgccaaatctatgtttttaagacttatccaccaatccacagcacctactactattactaagaacttaaaacctatataattatatataaacgactggaaggagttttaattaatgatggaattcactattaaaagagattattttattacacaattaaatgacacattaaaagctatttcaccaagaacaacattacctatattaactggtatcaaaatcgatgcgaaagaacatgaagttatattaactggttcagactctgaaatttcaatagaaatcactattcctaaaactgtagatggcgaagatattgtcaatatttcagaaacaggctcagtagtacttcctggacgattctttgttgatattataaaaaaattacctggtaaagatgttaaattatctacaaatgaacaattccagacattaattacatcaggtcattctgaatttaatttaagtggcttagatccagatcaatatcctttattacctcaagtttctagagatgacgcaattcaattgtcggtaaaagtgcttaaaaacgtgattgcacaaacaaattttgcagtgtccacctcagaaacacgcccagtactaactggtgtgaactggcttatacaagaaaatgaattaatatgcacagcgactgactcacaccgcttggctgtaagaaagttgcagttagaagatgtttctgaaaacaaaaatgtcatcattccaggtaaggctttagctgaattaaataaaattatgtctgacaatgaagaagacattgatatcttctttgcttcaaaccaagttttatttaaagttggaaatgtgaactttatttctcgattattagaaggacattatcctgatacaacacgtttattccctgaaaactatgaaattaaattaagtatagacaatggggagttttatcatgcgattgatcgtgcctctttattagcacgtgaaggtggtaacaacgttattaaattaagtacaggtgatgacgttgttgaattatcttctacatcaccagaaattggtactgtaaaagaagaagttgatgcaaacgatgttgaaggtggtagcctgaaaatttcattcaactctaaatatatgatggatgctttaaaagcaatcgataatgatgaggttgaagttgaattcttcggtacaatgaaaccatttattctaaaaccaaaaggtgacgactcggtaacgcaattaattttaccaatcagaacttactaaaaataaatataaataaaggatgacgtgattaattaaaacgtcatcctttattttttggcaaaaataattctagatgcgtatgtaaaataaatttggcagcattttaaacagcaaataaaagacgccaattaaatttatgacaaatatatccaaaatttaataagtgtgcttatatgccctttaaatttaaaattttaatagtcaataacaagttgaatataaaagttaaacgccgttaaatagcgttaaaaaattgaaaatgacagtattgccaaaaaataagaattaattatttatatgtaaacggtttctacctctattttaaatgaaatttgtgacaaaaaaaggtataatatattaatgacatacaaagaaatggagtgattattttggttcaagaagttgtagtagaaggagacattaatttaggtcaatttctaaaaacagaagggattattgaatctggtggtcaagcaaaatggttcttgcaagacgttgaagtattaattaatggagtgcgtgaaacacgtcgcggtaaaaagttagaacatcaagatcgtatagatatcccagaattacctgaagatgctggttctttcttaatcattcatcaaggtgaacaatgaagttaaatacactccaattagaaaattatcgtaactatgatgaggttacgttgaaatgtcatcctgacgtgaatatcctcattggagaaaatgcacaaggaaagacaaatttacttgaatcaatttataccttagctttagcaaaaagtcatagaacgagtaatgataaggaactcatacgttttaatgctgattatgctaaaatagaaggtgagcttagttatagacacggcacgatgccattaacaatgtttataactaaaaaaggtaaacaagtcaaagtgaatcacttagagcaaagtcgtctaactcaatatattggacacctcaatgtggttctatttgcgccagaagatttgaatattgtaaaaggctctcctcaaataagacgacgctttatagatatggagttgggccaaatttctgctgtttacttaaatgatttagctcaataccaacgtattttaaagcaaaagaataattacttaaagcagttacaattaggccaaaaaaaggacttaacaatgttggaagtattaaatcagcagtttgctgaatatgcaatgaaagtaactgataaacgtgcacattttattcaagagctagagtcgttagctaaaccgattcatgctggtatcacaaatgataaagaagcgttgtcgctgaattatttacctagtcttaaatttgattatgctcaaaatgaagcggcacgacttgaagaaattatgtctattcttagcgataatatgcaaagagaaaaagaacgaggcattagcttattcggaccacatcgagatgatataagttttgatgtgaatggcatggatgctcaaacatatggttctcaaggacagcaacgtacaacggctttgtccattaaattagctgaaattgagttaatgaatatcgaagttggggaatatcccatcttattattagacgatgtactcagtgaattagatgattcgcgtcaaacgcatttattaagtacgattcagcataaagtacaaacatttgtcactacgacatctgtagatggtattgatcatgaaatcatgaataacgctaaattgtatcgtattaatcaaggtgaaattataaagtaacagaaagcgatggtgactgcattgtcagatgtaaacaacacggataattatggtgctgggcaaatacaagtattagaaggtttagaagcagtacgtaaaagaccaggtatgtatataggatcgacttcagagagaggtttgcaccatttagtgtgggaaattgtcgataatagtatcgatgaagcattagctggttatgcaaatcaaattgaagttgttattgaaaaagataactggattaaagtaacggataacggacgtggtatcccagttgatattcaagaaaaaatgggacgtccagctgtcgaagttattttaactgttttacatgctggtggtaaatttggcggtggcggatacaaagtatctggtggtttacatggtgttggttcatcagttgtaaacgcattgtcacaagacttagaagtatatgtacacagaaatgagactatatatcatcaagcatataaaaaaggtgtacctcaatttgacttaaaagaagttggcacaactgataagacaggtactgtcattcgttttaaagcagatggagaaatcttcacagagacaactgtatacaactatgaaacattacagcagcgtattagagagcttgctttcttaaacaaaggaattcaaatcacattaagagatgaacgtgatgaagaaaacgttagagaagactcctatcactatgagggcggtattaaatcgtacgttgagttattgaacgaaaataaagaacctattcatgatgagccaatttatattcatcaatctaaagatgatattgaagtagaaattgcgattcaatataactcaggatatgccacaaatcttttaacttacgcaaataacattcatacgtatgaaggtggtacgcatgaagacggattcaaacgtgcattaacgcgtgtcttaaatagttatggtttaagtagcaagattatgaaagaagaaaaagatagactttctggtgaagatacacgtgaaggtatgacagcaattatatctatcaaacatggtgatcctcaattcgaaggtcaaacgaagacaaaattaggtaattctgaagtgcgtcaagttgtagataaattattctcagagcactttgaacgatttttatatgaaaatccacaagtcgcacgtacagtggttgaaaaaggtattatggcggcacgtgcacgtgttgctgcgaaaaaagcgcgtgaagtaacacgtcgtaaatcagcgttagatgtagcaagccttccaggtaaattagccgattgctctagtaaaagtcctgaagaatgtgagattttcttagtcgaaggggactctgccggggggtctacaaaatctggtcgtgactctagaacgcaggcgattttaccattacgaggtaagatattaaatgttgaaaaagcacgattagatagaattttgaataacaatgaaattcgtcaaatgatcacagcatttggtacaggaatcggtggcgactttgatctagcgaaagcaagatatcacaaaatcgtcattatgactgatgccgatgtggatggagcgcatattagaacattgttattaacattcttctatcgatttatgagaccgttaattgaagcaggctatgtgtatattgcacagccaccgttgtataaactgacacaaggtaaacaaaagtattatgtatacaatgatagggaacttgataaacttaaatctgaattgaatccaacaccaaaatggtctattgcacgatacaaaggtcttggagaaatgaatgcagatcaattatgggaaacaacaatgaaccctgagcaccgcgctcttttacaagtaaaacttgaagatgcgattgaagcggaccaaacatttgaaatgttaatgggtgatgttgtagaaaaccgtagacaatttatagaagataatgcagtttatgcaaacttagacttctaagcgctgtgaactgaacttttgaaggaggaactcttgatggctgaattacctcaatcaagaataaatgaacgaaatattaccagtgaaatgcgtgaatcatttttagattatgcgatgagtgttatcgttgctcgtgcattgccagatgttcgtgacggtttaaaaccagtacatcgtcgtatactatatggattaaatgaacaaggtatgacaccggataaatcatataaaaaatcagcacgtatcgttggtgacgtaatgggtaaatatcaccctcatggtgactcatctatttatgaagcaatggtacgtatggctcaagatttcagttatcgttatccgcttgttgatggccaaggtaactttggttcaatggatggagatggcgcagcagcaatgcgttatactgaagcgcgtatgactaaaatcacacttgaactgttacgtgatattaataaagatacaatagattttatcgataactatgatggtaatgaaagagagccgtcagtcttacctgctcgattccctaacttgttagccaatggtgcatcaggtatcgcggtaggtatggcaacgaatattccaccacataacttaacagaattaatcaatggtgtacttagcttaagtaagaaccctgatatttcaattgctgagttaatggaggatattgaaggtcctgatttccctactgctggacttattttaggtaagagtggtattagacgtgcatatgaaacaggtcgtggttcaattcaaatgcgttctcgtgcagttattgaagaacgtggaggcggacgtcaacgtattgttgtcactgaaattcctttccaagtgaataaggctcgtatgattgaaaaaattgcagaactcgttcgtgacaagaaaattgacggtatcactgatttacgtgatgaaacaagtttacgtactggtgtgcgtgtcgttattgatgtgcgtaaggatgcaaatgctagtgtcattttaaataacttatacaaacaaacgccacttcaaacatcatttggtgtgaatatgattgcacttgtaaatggtagaccgaagcttattaatttaaaagaagcgttggtacattatttagagcatcaaaagacagttgttagaagacgtacgcaatacaacttacgtaaagctaaagatcgtgcccacattttagaaggattacgtatcgcacttgaccatatcgatgaaattatttcaacgattcgtgagtcagatacagataaagttgcaatggaaagcttgcaacaacgcttcaaactttctgaaaaacaagctcaagctattttagacatgcgtttaagacgtctaacaggtttagagagagacaaaattgaagctgaatataatgagttattaaattatattagtgaattagaagcaatcttagctgatgaagaagtgttattacagttagttagagatgaattgactgaaattagagatcgtttcggtgatgatcgtcgtacagaaattcaattaggtggatttgaagacttagaggacgaagacttaattccagaagaacaaatagtaattacactaagccataataactacattaaacgtttgccggtatctacatatcgtgctcaaaaccgtggtggtcgtggtgttcaaggtatgaatacattggaagaagattttgtcagtcaattggtaactttaagtacacatgaccatgtattgttctttactaacaaaggtcgtgtatacaaacttaaaggttatgaagtgcctgagttatcaagacagtctaaaggtattcctgtagtgaatgctattgaacttgaaaatgatgaagtcattagtacaatgattgctgttaaagaccttgaaagtgaagacaacttcttagtgtttgcaactaaacgtggtgtcgttaaacgttcagcattaagtaacttctcaagaataaatagaaatggtaagattgcgatttcgttcagagaagatgatgagttaattgcagttcgcttaacaagtggtcaagaagatatcttgattggtacatcacatgcatcattaattcgattccctgaatcaacattacgtcctttaggccgtacagcaacgggtgtgaaaggtattacacttcgtgaaggtgacgaagttgtagggcttgatgtagctcatgcaaacagtgttgatgaagtattagtagttactgaaaatggttatggtaaacgtacgccagttaatgactatcgtttatcaaatcgtggtggtaaaggtattaaaacagctacgattactgagcgtaatggtaatgttgtatgtatcactacagtaactggtgaagaagatttaatgattgttactaatgcaggtgtcattattcgactagatgttgcagatatttctcaaaatggtcgtgcagcacaaggtgttcgcttaattcgcttaggtgatgatcaatttgtttcaacggttgctaaagtaaaagaagatgcagaagatgaaacgaatgaagatgagcaatctacttcaactgtatctgaagatggtactgaacaacaacgtgaagcggttgtaaatgatgaaacaccaggaaatgcaattcatactgaagtgattgattcagaagaaaatgatgaagatggacgtattgaagtaagacaagatttcatggatcgtgttgaagaagatatacaacaatcatcagatgaagaataataaaaaataagacttccctatatgtaggggagtcttatttttatgctagaaagtaatgctttactatattcaatgattagtaatgactaactttctaattgtttcattgcgtaaggtatttcattgataagtcttgatggtggcaccacatacatatcttttgcaaggttttcgccaataaaactatgtgtatatgtggcactcataaccgcttcttttaagttatcaaattgaccgacaaagcttgtaatcataccagcaagtgtatcgcccataccaccagtcgccattgctgggctaccgattgtcaatttaaagtcttcatctttaaagaaaatttcagtaccatgttttttaagtacaacagttgcacctaaacgatcaactgcttcacgattacgctcatatgtctgttcctcaataggaataccacttaatcgttcccattctttgaggtgtggtgtaaagatcacacgacatgtaggtaattgcggtttcagtttactaaagattgtaatcgcatcgccgtctacgattaaattttgatgcggttgtatattttgtagtaggaatgtaatggcattatttcctttgaaatcaacgccaagacctggaccaattagtatactgtcagtcatttcaatcattttcgtcaacattttcgtatcattaatatcaataaccatcgcttctgggcaacgagaatgtaatgctgaatgatttgttggatgtgtagctacagtgattaaaccactaccgctaaatacacatgcacgagccgctaacataatggcaccacctaagttagcagatccaccaattaataaaattttgccataatcacctttatgtgaatcttctttacgcttaggaatgttaatagaatttaacgtttccatagtgatataacctcccatgtaaaagccttttccgaatttattcaattttaaaaatatatagtaacttttaacaaaatgtattataaatttctgaattcattattatttgtcgttaaatacaatagaaaatactatacctgtatatgcaattcgtcaatagataaattattaaatatgcttacaacaatcttaatatcctttaacgcactacaatagtgctctgataataggttataaatgtacgtaaaaccattgtttcaataaaaatgaaaacgtatacttcaagaaggatgggttacttaatataaacaagggggtaacatatatgactttatatttagatggtgaaacactaacaattgaggatattaaatcatttttacaacaacaatcaaagattgaaattattgatgatgcgttagaacgtgtcaaaaaaagtagagcggtagttgaacgtattattgaaaatgaggaaacggtttacggtattactacaggttttgggttatttagtgatgtacgtatagacccgacgcaatataatgaattacaagtgaatctgatacgctcacatgcctgtggactaggtgagccattttcaaaagaagtagcattagtcatgatgattttacgattgaatacattattaaaaggtcattcaggtgccactttagaattagtgagacaattacaattttttataaatgaacgtattataccgataatcccacagcaaggctctctcggtgcatcaggagatttagcgccattatcacatttagcattagcattaattggtgaagggaaagtattgtacagaggggaagaaaaggatagtgacgatgtattaagagaattaaatagacaacctttgaaccttcaggctaaagaaggtttagcattgattaatggtacgcaagctatgacagctcaaggtgtcattagttatatagaatcagaagatttaggttaccaatctgaatggattgctgcattaacgcatcagtctcttaatggcattatagatgcatatagacatgatgtgcacgctgttcgtaattttcaagaacagattaatgtggcagcgcgtatgcgtgattggttagaaggatcaacattaacgacgcgacaagcagaaatacgtgtacaagatgcatatacgttgcgttgtataccacaaatccatggcgcgagttttcaagtattcaattatgttaaacagcaattagaatttgaaatgaatgcggctaatgataatccacttatatttgaggaagcaaatgaaacgtttgttatttcaggtggtaacttccatggacaacctattgcttttgcattagatcatcttaaattaggtgtaagtgaattagcaaacgtatcggaacgtcgtttagagcgactagtaaatcctcaattaaatggtgatttaccagcatttcttagtccagagccaggattgcaaagtggcgcgatgattatgcaatatgctgctgcaagtctcgtttctgaaaataaaactttagcgcatccagcgagtgttgattctatcacttcatctgcgaaccaagaagatcacgtatctatgggaactacagctgctagacatggttatcaaattattgaaaatgcaagacgtgtgctggcaatcgaatgtgttattgcattacaagcagcagagttaaaaggtgttgaaggtttatcaccaaaaacacgtcgtaaatatgaggagtttcgaagtatcgtgccatccattacacatgaccgtcaatttcataaagatattgaagcggttgcacagtatttaaagcaatcaatttatcaaacgactgcatgtcactaaatcgacatgagcgatgtttgaaatcgttacttgaaaaagcaaatatagtttgctatattaaaaataacttaataagacattgttcgtaggacaagtaatatatagtgttcgatatcagagagcttgtggttagtgtgaacaagaatcaacatatatatgaatctacctacttaatttaaaagaacaatcggtgataaccgttattttagtgaagtgcaatttaggtttagtgtatctttataacttaaattgttaaatagggtggcaacgcgtagaccacgtcccttgtagggatgtggtctttttttattttctaaaaaataaagacgtacgtcattccataataaatgataattatttgggaaaggatgaaggttaatgttagacattagattattcagaaatgagcctgtcacagttaagagcaaaattgaattacgtggagatgattcaaaagttgtagatgaaattttagaattggatgagcaacgacgtaaattaattagtgcaacagaagaaatgaaagcacgtcgtaataaagtaagcgaagaaatcgcattaaaaaaacgtaataaagaaaatgctgatgatgtgattgctgaaatgcgcacattaggtgacgatattaaagaaaaagatagtcaattaaatgaaattgataataaaatgacaggtatcctttgtcgtattccaaatttaataagtgatgatgtacctcaaggtgaatctgatgaagataacgttgaagttaaaaagtggggtacaccacgtgagttttcatttgaacccaaagcacattgggatattgtagaagaattgaaaatggctgattttgatcgtgcagcaaaagtttcaggtgcgcgttttgtatatttaacaaatgaaggtgcgcaattagagcgtgctttaatgaactatatgattacaaaacatacaacacaacatggttatacagaaatgatggtaccacagcttgtgaacgcagatacaatgtatggtacaggtcaattacctaaatttgaagaagatttatttaaagtagaaaaagaaggattatatacaattccaactgctgaagtaccattaacgaatttctaccgtaatgaaattattcaaccaggtgtacttcctgaaaaattcactggtcaatctgcatgtttccgtagtgaagcaggatcagcaggtagagatacaagaggattaattcgtttacatcaattcgataaagtggaaatggtacgttttgaacaacctgaagattcatggaatgctttagaagaaatgacaacaaacgcagaagcaattctagaagagttaggtttaccatatcgtcgtgttattttatgtacaggtgatattggatttagtgcaagcaaaacatatgatttagaagtttggttaccaagctacaatgattataaagaaattagttcatgctcaaactgtacggatttccaagcgcgtcgtgctaacatccgcttcaagcgtgacaaagcagctaaaccagaattagcacatacattaaatggtagtggtttagcagttggacgtacatttgctgctattgttgaaaattaccaaaatgaagatggaacagtaacaattccagaagcattagtaccatttatgggtggtaaaacacaaatttcaaaaccagttaaataaaggctttagctacaagctttaaaaagtatatatctacgtatacttaaagcaagggcaagatactttaaataatattttaaaaagtggtgacgaagctgtcgccactttttttgtgctgtaaaagtatagtagtgagccaatgcacataacaacaataaattaagtttgttgtttaatggggtgaacgcatttcattatagcaacaatacgggataattatgatgaactaaaacaatctaaaacgtaacaattttgagcatcactattataggaaattaagcgataaaatactgatttcgttgatgtagtatgagtaatatcgatggagtagggtagggggaggggatgatgattataagggagtggtacatgaatcaatatcccagactcatcattagatataaaaatttataaaattagtatttaaaaacaactacaatccatagaaaatatggaggtagtcttaaataaaaaattgaaaattctaaaaaaataaaaagttaatatgaagctgattaaagactccggtatgtctaacttcagacaaaccagtgtctaacgttattgcttgtgatatagaactgtattagactaggtatattatttttttcgtaattatataaatataaagtggcaaaggaggtagttgagatgacaacacatttaagttttagacaaggcgtgcgagagtgtgtcccaacattattgggttatgccggtgttggtatttcatttggtattgtggcttcgtctcaaaactttagtattttagaaattgtcttgttatgtcttgttatatatgccggtgctgcgcaatttattatgtgcgcgttgtttatagcaggtacaccgatatcagcgattgtactaactgtatttatcgtaaattcaagaatgttccttttaagtatgtcgcttgcaccaaacttcaagacatatgggttttggaaccgtgttggattaggttcattagtaactgacgaaacgtttggcgtcgccattacaccttatttaaaaggagaagctatcaatgatcgttggatgcatggtcttaatatcacagcatatttattttgggcaatttcatgtgtagcaggtgcattgtttggcgagtatatttcgaatccacaagcattagggttagattttgctatcacggctatgtttatctttttggccattgcgcaatttgaatcaattactaaatcgcgattaagaatttacatagtactcattattgccgtcatagtaatgatgttatcgctaagtatgtttatgccttcatatctagcaatattaattgcagccacaatttcagcagcgttaggagtgatgatggaacgatgataactcatatgaacatgttaatacttattttattgtgtggtatcgtaacgctattaattcgaattataccttttatcatgatttcaaaagtgcaattgcctgatgtcgtggttcgatggctatcatttatcccaatcacactatttacggcacttgtcatagacagcattattcaacagacgcctcatggtgaggggtatacattaaacatcccttacattatcgcgctcattccgacggttattttatctataatcacgcgtagtttaactattacaattattagtgggattgttatcatggcagcattacgatttttcttttaaaaataactgaaaatcattgaacagatatttaaacttaggtaaactgttagtaatcagaaaattctgatatacaaatcgtctatgttaagattgggaatcgtgtatacgtaagcgatttggctaacgcatgacaatgataacaacattttaaatgataaagtaattcatcactgaatctcaactaacacataacaatttcatatttcttattgtgagaagttgagggacttggccctgtgatacttcagcaaccgactttatagcacggtgctaaaaccaacgagttactcgaatgataagtataaagacttcttacttttcaatagggtgagaagttttttttgtttaaggaggaaaaaacaatgacaaattacacagtagatactttaaatttagggaaatttattacagaatctggggaagtcatagataacttgcgtttgagatatgagcatgtcggttatcatggacaaccattagttgtagtttgtcatgcattaactggcaatcatttaacatatggaacagatgattatccgggttggtggcgagaaattattgatgggggatatatacccattcacgattatcaatttttaacatttgatgttattggtagtcctttcggttcaagttcacctttaaacgaccctcattttcctaaaaaattaacattaagagatatagtcagagcgaatgaacgaggtatacaagcccttggttatgacaagattaatattttaatagggggaagccttggaggaatgcaagcaatggaactactttacaatcaacagtttgaagtagataaagccattatccttgctgcaacaagccgaacatcatcttatagtagagctttcaatgaaattgcaaggcaagccattcatcttggtggtaaggaaggtctaagtattgcacgccaattaggttttttgacatatcgatcatcaaaaagttatgatgaacgtttcacgccggatgaagtagtcgcataccaacaacatcaaggtaataaatttaaagaacattttgatttgaattgttatctgacactgctagatgtattggatagtcacaacattgaccgaggtcgcacagacgtaacgcatgtttttaaaaatttagaaacaaaagtgttaacgatggggttcatagatgatttgctatatccggatgatcaagttcgtgcattaggtgaacgttttaaatatcatcgtcatttcttcgtgcctgataatgttgggcatgatggattcctactaaactttagtacctgggcacctaacttatatcatttcttaaatttaaagcattttaagcgtaagtaataatatatatattttcaaagaatgaagccactaaatcacagctatcatattcaaaaacatctagagtacatgagagtggtaatgaattgtaaatctaaatcaagcttgattgctatgtagtgggattaaataatcatgttgaaaatgaaagcacacaaaagcgattcaaatgagtatgttaattacttataaaacatgaaagttattattcaattaaatgaaatagaagcatacaatctataaattgttaaattccattaaagaggttaaaataatagctatagttaaaaatatgggagtggcttatgtgttttcaaaaatacaacctaaagcaacaataattgcaacgattgcgttggtatttgtcgctttagctttatatctagtgcctggtttaggactaatatttgcattgtttgcaaccataccaggtatcgttttatggaataaatcaatacaatctttcgggattagtgcacttattacagtaattataacaactgttttaggtaatactttcgttttaagtgccatcatattagtcttaattgcaagtttaattattggtcaattgctcaaagaaagaacgtctaaagaaagaatattatacgtaacaacagtagcgatgagcttaatttcattaatcgcttttatgttactacaaacattcggaagaattccaccatcagcgagcatagtaaaacctttcaagcaaacattacatgaagcgattacgatgagcggtgccgatgcgaatatgacccaaatattagaagaagggtttagacaagcgaccgttcaattaccaggtttcatcattatcattacatttttaatcgtcttaattaacttaatcgttacatttccgattttacgaaaatttaaaatcgctacacctgtatttaagccacttttcgcgtggcaaatgagcggtattttattatggatatacattattgttatcatatgtttattatttacaggtcaaccgagtgtgttccagagcattcttttaaacttccaacttgtgttatcattagtaatgtatattcaaggtttaagtgttattcatttctttggtaaagcgaaaggtttgccgaatgcagtaacgattttactattgattatcggtacaatactgacacctacgacacatattgtaggactacttggtgttatcgatttaagtttgaatttgaagcgaatcatgaaaaataattctaaaaagtgaatagaggtggaataatgaatcggcagtccactaagaaagctttactaataccatttgtcatcatgatcatcacagcaattgttttaatgggtgtatggtttatctttaatagtcttatagcactaattgcatctatcgttcttgtcgtgatgattattgttagcatcgttttattcagacaagctttaatgaaaatggatagttatgtagatggtttgagtgctcaaatttcaacaacaaataataaagcaatcaaacatttaccaattggtatcattgttttagatgaaaatgatcacatcgaatgggttaaccaatttatgacagatcatatggaagcaaatgtcatttctgaatctgtaaatgaagtatttccaaacattttaaagcaattagatagagtgaaatccgttgaaatagaatataatcagtatcatttccaagtacgttattctgagaatgatcactgcctctatttctttgatataactgaacaagtacaaacaaatgaactatatgaaaattctaaaccaatcattgcgacattatttttagataactacgatgagattactcaaaatatgaatgatacgcagcgttcggaaatcaattcaatggtaacgcgtgttattagtcgatgggcaactgagtataatatattctttaaaaggtatagttccgatcaattcgtagcctatttaaatcaaaaaatattagctgacttagaagaatctaaatttgatatcttgagtcaattacgtgaaaaaagtgttggttatcgtgcccaattaacattaagtattggtgttggtgaaggtactgaaaatttaatcgatttaggtgaattatcacaatcaggcctagacttagcattaggacgcggtggcgaccaagttgcaattaaaagtattaatggtaatgtgcgcttctatggcggtaagactgacccgatggagaaacgtactcgtgtaagagcgcgtgttatctcacatgcgttaaaagatatccttgcagagggtgacaaagtcattatcatgggacataaacgtcctgacttagatgcaattggtgcagcaatcggtgtgtctagatttgcaatgatgaataatttagaagcatacatcgtattaaatgagactgacattgatccaacattacgacgcgtgatgaacgaaattgataaaaagccagagttaagagagcgatttattacatcagatgatgcttgggatatgatgacatctaagacaaccgtagtgattgttgatacgcataaaccggaactggttttagatgaaaatgtcttaaataaagcaaaccgtaaagttgttatcgatcatcatagacgtggtgaaagcttcatctctaatccattgttgatatatatggaaccatacgcaagttcgacagctgaattggtaacagagttactggaatatcaaccaacagaacaacgtttaacacgtcttgaatcaacagtgatgtatgcaggtattattgtagatacaagaaactttacattacgaacaggatcaagaacattcgatgcagcgagttatttacgtgcacatggtgcagatacgattttaacgcaacatttcttaaaagatgatgtggatacttacattaatcgatctgaattaattcgaactgtaaaagttgaagataatggcatagcaattgcgcatggttcagacgataaaatttatcatccagtaacagttgcacaagcagcagatgaactgttaagtttagaaggtattgaagcatcatatgttgttgcgagacgtgaagataatctgattggtatatctgcgcgttcactcggttcagtaaatgtccagttaacaatggaagcacttggtggcggtggacatttaaccaatgcggcaacacaacttaaaggtgtgacagtcgaagaggcgatagcacaattacaacaagcaattacagaacaattaagtaggagtgaagatgcatgaaagtaatttttacacaagatgttaaaggtaaaggtaaaaaaggtgaagttaaagaagtaccagtaggttatgcaaataacttcttattgaaaaagaattatgctgtagaagcaacaccaggtaaccttaaacaattagagttacagaaaaaacgtgcaaaacaagaacgccaacaagaaattgaagatgctaaagcattaaaagaaacgttatcaaacattgaagttgaagtatcagcaaaaactggtgaaggtggtaaattgtttgggtcagtaagtacaaaacaaattgccgaagcactaaaagcacaacatgatattaaaattgataaacgtaaaatggatttaccaaatggaattcattccctaggatatacgaatgtacctgttaaattagataaagaagttgaaggtacaattcgcgtacacacagttgaacaataaagttggattgaaataagaggtgtaaccattcatggatagaatgtatgagcaaaatcaaatgccgcataacaatgaagctgaacagtctgtcttaggttcaattattatagatccagaattgattaatactactcaggaagttttgcttcctgagtcgttttataggggtgcccatcaacatattttccgtgcaatgatgcacttaaatgaagataataaagaaattgatgttgtaacattgatggatcaattatcgacggaaggtacgttgaatgaagcgggtggcccgcaatatcttgcagagttatctacaaatgtaccaacgacgcgaaatgttcagtattatactgatatcgtttctaagcatgcattaaaacgtagattgattcaaactgcagatagtattgccaatgatggatataatgatgaacttgaactagatgcgattttaagtgatgcagaacgtcgaattttagagctatcatcttctcgtgaaagcgatggctttaaagacattcgagacgtcttaggacaagtgtatgaaacagctgaagagcttgatcaaaatagtggtcaaacaccaggtatacctacaggatatcgagatttagaccaaatgacagcagggttcaaccgaaatgatttaattatccttgcagcgcgtccatctgtaggtaagactgcgttcgcacttaatattgcacaaaaagttgcaacgcatgaagatatgtatacagttggtattttctcgctagagatgggtgctgatcagttagccacacgtatgatttgtagttctggaaatgttgactcaaaccgcttaagaacgggtactatgactgaggaagattggagtcgttttactatagcggtaggtaaattatcacgtacgaagatttttattgatgatacaccgggtattcgaattaatgatttacgttctaaatgtcgtcgattaaagcaagaacatggcttagacatgattgtgattgactacttacagttgattcaaggtagtggttcacgtgcgtccgataacagacaacaggaagtttctgaaatctctcgtacattaaaagcattagcccgtgaattagaatgtccagttatcgcattaagtcagttatctcgtggtgttgaacaacgacaagataaacgtccaatgatgagtgatattcgtgaatctggttcgattgagcaagatgctgatatcgttgcgttcttataccgtgatgattactataaccgtggcggcgatgaagatgatgacgatgatggtggttttgagccacaaacgaatgatgaaaacggtgaaatagaaatcatcattgctaagcaacgtaacggtccaacaggcacagttaagttacactttatgaaacaatataataaatttacagatatcgattatgcacatgctgatatgatgtaaaaaaagtttttccgtacaataatcattgcgatgataaaattgtacggtttttattttgttctgaacgggttgatatatgttaagtttgtgtattgaaagtgatggattagtactgtcaacgcctctgttaaagggtttttaggacgttgaagacgatttgttaaaatgatttttcttttaaaaaggctgaaaatcaatgttcgatttttatttgcattatggtctcgatattggtagaatatcaaatggttaaatgagaaaaacttggaggtgctcacatgtcatcaatcgtagtagttgggacacaatggggagacgaaggaaaaggaaaaataacggatttcttggcagaacagtcagatgttatcgcgcgtttttcaggtggtaataatgcaggccataccattcaatttggcggagaaacatataaattacatttagtaccatctggtatcttttacaaagacaaattagcggtaatcggtaacggtgtcgttgttgatccagttgcactattgaaagaattagacggattaaatgaacgtggcattcctacaagtaatttacgtatatctaatcgtgcgcaagtgattttaccatatcacttagcacaagatgaatatgaagaacgtttacgcggtgacaataagattggtacaactaaaaaaggtatcggtccagcatatgtagacaaagttcaacgtatcggtattcgtatggcagatttacttgaaaaagaaacattcgaaagattattaaaatcaaacattgaatataaacaagcatatttcaaaggtatgtttaacgaaacatgtccatcatttgatgatatctttgaagaatactatgctgcaggtcaacgtttaaaagaatttgtaacagacacatcaaaaatcttagacgatgcatttgtagcagatgaaaaggtacttttcgaaggtgcgcaaggtgtaatgttagatatcgaccatggtacatatccattcgttacatcaagtaatccaattgcaggtaacgttactgttggtacaggtgtaggtcctacattcgtttcaaaggtaattggtgtatgtaaagcttatacatcacgtgttggtgatggtccattccctactgaattattcgatgaagatggacatcatattagagaggttggtcgtgaatacggtacaacaacaggacgtccacgtcgtgtaggttggtttgattcagttgtattacgtcactctcgtcgtgtaagtggtattacagatttatctattaactcaatcgatgttttaacaggcctagacacagtgaaaatctgtacagcttatgaattagacggtaaagaaattactgagtacccagcaaacttagatcaattaaaacgttgtaaaccaatctttgaagagttaccaggttggacagaagacgtaacaaatgtgcgtactttagaagaattacctgaaaatgcacgtaaatatttagagcgtatttcagaattatgtaatgtacaaatttctatcttctcagttggtccagatagagaacaaacaaacctattaaaagaattgtggtagaactttatataagtcatacacaatgattataaatacatgagccttctatctttattggtaggaggcttttgttatgcttgcttctgtatcgattcgattatttagataaaaaatactaacgtaaaggcgatatttgctagtcataatttagaagattagatgatatttaacgaaaattaagatgaaatacttgaatgtaagaagtctgatgtcgaaaatagctattaaaatagagtagacgtaagtgtaaatgaaagcacctaaaatagaaaaatttcaaaaatagcgtaattattataataaatagactgccaataaaatgcaatttttcacttataacattcttcaaaaaataatagcaaaattatgtaaaaaatatcttgtcatggcaagattggctgtgctataatctatcttgtgcttaagaacggctccttggtcaagcggttaagacaccgccctttcacggcggtaacacgggttcgagtcccgtaggagtcaccattttttaggtctcgtagtgtagcggttaacacgcctgcctgtcacgcaggagatcgcgggttcgattcccgtcgagaccgtacaaatgcctatccaagaggataggcatttttttgcgtttaatattatattaataaaagatatatggacgaatgataatcatattgatttatctgttcgtccattttctttaaaatgtatgaacctcaagtaacttagtggttggatatgaaagataaacgtagacaataaaatctttattagacgtacaaacatatgctactgtcaacatatttcttcgttgtgatatgccaccagtcctccataacatcaattgttaaagtaacgaataacgaataatgatatttattttctgagcaatgacgtgcaactagaagttgccattatcctaattttattattggaatagagacctcatcattgtgttaaatatcattgtcacaatccgccgtgagaaactaataaaaaatagtaatatataagtttatattggaaaatagaattaatagcttataaatggtaaattatataataggttactatacgttataagacggaaaatgcgcacaataacaaaaatagtaagcgacatcctgtgattttttacacaaacataaacgataaagaacaaaaaatgataaaataatattaatgatttaagaaaagaggtttatgcaaatggctagaaaagttgttgtagttgatgatgaaaaaccgattgctgatattttagaatttaacttaaaaaaagaaggatacgatgtgtactgtgcatacgatggtaatgatgcagtcgacttaatttatgaagaagaaccagacatcgtattactagatatcatgttacctggtcgtgatggtatggaagtatgtcgtgaagtgcgcaaaaaatacgaaatgccaattataatgcttactgctaaagattcagaaattgataaagtgcttggtttagaactaggtgcagatgactatgtaacgaaaccgtttagtacgcgtgaattaatcgcacgtgtgaaagcgaacttacgtcgtcattactcacaaccagcacaagacactggaaatgtaacgaatgaaatcacaattaaagatattgtgatttatccagacgcatattctattaaaaaacgtggcgaagatattgaattaacacatcgtgaatttgaattgttccattatttatcaaaacatatgggacaagtaatgacacgtgaacatttattacaaacagtatggggctatgattactttggcgatgtacgtacggtcgatgtaacgattcgtcgtttacgtgaaaagattgaagatgatccgtcacatcctgaatatattgtgacgcgtagaggcgttggatatttcctccaacaacatgagtagaggtcgaaacgaatgaagtggctaaaacaactacaatcccttcatactaaacttgtaattgtttatgtattactgattatcattggtatgcaaattatcgggctgtattttacaaataatcttgaaaaagagctgcttgataattttaagaagaatattacgcagtacgctaaacaattagaaattagtattgaaaaagtatatgacgaaaagggctccgtaaatgcacaaaaagatattcaaaatttattaagtgagtatgccaaccgtcaagaaattggagaaattcgttttatagataaagaccaaattattattgcgacgacgaagcagtctaaccgtagtctaatcaatcaaaaagcgaatgatagttctgtccaaaaagcactatcactaggacaatcaaacgatcatttaattttaaaagattatggcggtggtaaggaccgtgtctgggtatataatatcccagttaaagtcgataaaaaggtaattggtaatatttatatcgaatcaaaaattaatgacgtttataaccaattaaataatataaatcaaatattcattgttggtacagctatttcattattaatcacagtcatcctaggattctttatagcgcgaacgattaccaaaccaatcaccgatatgcgtaaccagacggttgaaatgtccagaggtaactatacgcaacgtgtgaagatttatggtaatgatgaaattggcgaattagctttagcatttaataacttgtctaaacgtgtacaagaagcgcaggctaatactgaaagtgagaaacgtagactggactcagttatcacccatatgagtgatggtattattgcaacagaccgccgtggacgtattcgtatcgtcaatgatatggcactcaagatgcttggtatggcgaaagaagacatcattggatattacatgttaagtgtattaagtcttgaagatgaatttaaacttgaagaaattcaagagaataatgatagtttcttattagatttaaatgaagaagaaggtctaatcgcacgtgttaactttagtacgattgtgcaggaaacaggatttgtaactggttatatcgctgtgttacatgacgttactgaacaacaacaagttgaacgtgagcgtcgtgaatttgttgccaatgtatcacatgagttacgtacacctttaacttctatgaatagttacattgaagcacttgaagaaggtgcatggaaagatgaggaacttgcgccacaatttttatctgttacccgtgaagaaacagaacgaatgattcgactggtcaatgacttgctacagttatctaaaatggataatgagtctgatcaaatcaacaaagaaattatcgactttaacatgttcattaataaaattattaatcgacatgaaatgtctgcgaaagatacaacatttattcgagatattccgaaaaagacgattttcacagaatttgatcctgataaaatgacgcaagtatttgataatgtcattacaaatgcgatgaaatattctagaggcgataaacgtgtcgagttccacgtgaaacaaaatccactttataatcgaatgacgattcgtattaaagataatggcatcggtattcctatcaataaagtcgataagatattcgaccgattctatcgtgtagataaggcgcgtacgcgtaaaatgggtggtactggattaggactagccatttcgaaagagattgtggaagcgcacaatggtcgtatttgggcaaacagtgtagaaggtcaaggtacatctatctttatcacacttccatgtgaagtcattgaagacggtgattgggatgaataataaggaacatattaaatctgtcattttagcgctactcgtcttgatgagtgtcgtattgacatatatggtatggaacttttctcctgatattgcaaatgtcgacaatacagatagtaagaagagtgaaacgaaacctttaacgacacctatgacagccaaaatggatacaactattacgccatttcagattattcattcgaaaaatgatcatccagaaggtacaatcgcgacggtatctaatgtgaataaactgacgaaacctttgaaaaataaagaagtgaagtccgtggaacatgttcgtcgggatcataacttgatgattcctgatttgagcagtgattttacattattcgattttacgtatgatttaccgttatcaacatatcttggccaagtactgaacatgaatgcgaaagtaccaaatcatttcaatttcaatcgtttggtcatagattatgatgctgatgataatatcgtgctttatgctataagcaaagatcgccacgattacgtaaaattaacaactacaacgaaaaatgatcattttttagatgcattagcagcagtgaaaaaagatatgcaaccatacacagatatcatcacaaacaaagatacgattgatcgtacgacgcatgtttttgcaccaagtaaacctgaaaagttaaaaacatatcgcatggtatttaacacgattagtgttgagaaaatgaatgctatactatttgacgattcaaccatcgttcgtagttcaaagagtggtgttacaacctacaacaataatacaggtgtcgcaaactataacgataaaaatgaaaaatatcattataaaaacttgtccgaagatgaagcgagttccagcaaaatggaagaaacgattccaggaacctttgattttattaatggtcatggtggtttcttaaacgaagacttcagattgtttagtacgaataatcagtcaggcgagttaacatatcaacgtttccttaatggttatccaacgtttaataaagaaggctctaatcaaattcaagtcacttggggtgaaaaaggcgtctttgattatcgtcgttcgttattacgcaccgacgttgttttaaacagtgaagataataaaacgttgccgaaattagagtctgtacgttcaagcttagcgaacaatagtgatattaattttgaaaaagtaacaaacatcgctatcggttacgaaatgcaggataactcagatcataatcacattgaagtgcagattaacagtgaactcgtaccgcgttggtatgtagaatatgatggcgaatggtatgtttataacgatgggaggcttgaataaatgaactggaaactgacaaagacacttttcattttcgtgtttattcttgtcaacatcgtgttagtatcgatttatgttaataaagtcaatcgctcacacattaatgaagttgagagtaacaatgaagttaattttcagcaagaagaaattaaagtaccggctagtatattgaataaatcagttaaaggtataaaattagagcaaattacagggcgatcaaaagactttagttctaaagctaaaggcgattcggatttgaccacatcagatggtggaaaattattaaatgcgaacattagtcaatcggtaaaggtcagtgacaataacttaaaagatttgaaagattatgttaacaaacgtgtgttcaaaggttcagaatatcaattaagtgaaattagttctggttctgtaaaatacgaacaaacgtatgataatttcccgattttgaacaatagtaaagcgatgttgaactttaatatagaagataacaaagcgactagttataaacaatcaatgatggatgacattaagcccacagatggtgcagataagaagcatcaagtgattggtgtgagaaaagcaatcgaggcattatattataatcgttacttgaaaaaaggtgatgaagtcattaatgctagacttggttactattcagtcgtgaatgaaacgaatgttcaattgttacaaccaaactgggaaattaaagtgaagcatgacggtaaggacaaaacgaatacttactatgtcgaagcgacaaataataaccctaaaattattaatcattaatatgaatcgtaataagctagcattgcaagctcatcatatgtgagaagcggtgctagctttttgctggtacggtttattatggctgacgtttctgtgtctccaacgtgcgcatttattcatattttaagtagtaccgcattgtaaaattagtgtaactgttattttaaaaactttagtatttgtctaatcattgttataataattaggacattcattgcacgtgattatcaaaatttaattataagagaccggtcgatgaactaaagttacataataggaaaggtatacaaaacagctaatatactgatagtttctgtagggaaaatcgtatatttgcactgatgtatattgcagtcatatagagagattgactgcttaaatagaaaggatgagccgcttgatacgcatgagtgtattagcaagtggtagtacaggtaacgccacttttgtagaaaatgaaaaaggtagtctattagttgatgttggtttgactggcaagaaaatggaagaattgtttagtcaaattgaccgtaatattcaagatttaaatggtattttagtaacccatgaacatattgaccatattaaaggtttaggtgttttagcgcgtaaatatcaattgccaatttatgcgaatgaaaagacttggcaagctattgaaaagaaagatagtcgcatccctatggatcagaaattcatttttaatccttatgaaacgaaatctattgcaggtttcgatgttgaatcgtttaacgtgtcacatgatgcgatagatccgcaattttatattttccataataactataagaagtttacgattttaacggatacgggatatgtgtcggatcgtatgaaaggtatgatacgtggcagcgatgcgtttatttttgagagtaatcatgacgtcgatatgttgagaatgtgtcgttatccatggaagacgaaacaacgtattttaggcgatatgggacatgtatctaatgaggatgcgggccatgcgatgacggatgtgattacaggcaacacgaaacgtatttacctatcacatttatcacaagataataatatgaaagatttggcgcgtatgagtgttggtcaagtattgaacgaacacgatattgatacggaaaaagaagtattgctatgtgatacggataaagctattccaacgccaatatatacaatataaatgagagtcaccctataaagttcggcactgctgtgagacgactttatcgggtgcttttttatgttattggtgggaaatggctgttgttagattgaaccggcttgattgaaatgtgtaaaataattcgatattaaatgtaatttataaataatttacataaaatcaatcattttaatataaggattatgataatatattggtgtatgacagttaatggagggaacgaaatgaaagctttattacttaaaacaagtgtatggctcgttttgctttttagtgtgatgggattatggcaagtctcgaacgcggctgagcagcatacaccaatgaaagcacatgcagtaacaacgatagacaaagcaacaacagataggcaacaagtaccgccaacaaaggaagcggctcatcattatggtgaagaagcggcaaccaacgtatcagcatcagcgcagggaacagctgatgatacaaacaacaaagtaacatccaacgcaccaactaacaaaccaactacagcagtttcaacaacaggaaacaaaagacacgatgtagatgcacaacaagcctcaacacaaaaaccaactcacacagcaacattcaaattatcaaatgctaaaacagcatcactttcaccacgaatgtttgctgctaatgtaccacaaacaacaacacataaaatattacatacaaatgatatccatggccgactagccgaagaaaaagggcgtgtcatcggtatggctaaattaaaaacagtaaaagaacaagaaaagcctgatttaatgttagacgcaggagacgccttccaaggtttaccactttcaaatcaatctaaaggtgaagaaatggctaaagcaatgaatgcagtaggttatgatgctatggcagtcggtaaccatgaatttgactttggatacgatcagttgaaaaagttagagggtatgttagacttcccgatgctaagtactaacgtttataaagatggaaaacgcgcgtttaagccttcaacgattgtaacgaaaaatggtattcgttatggaattattggcgtaacgacaccagaaacaaagacgaaaacaagacctgaaggcattaaaggtgttgaatttagagatccattacaaagtgtgacagcggaaatgatgcgtatttataaagatgtagatacatttgttgttatatctcatttaggtattgatccttcaacacaagaaacatggcgtggcgattacttagtgaaacaattaagtcaaaatccacaattgaagaaacgtattacagtgattgacggtcattcacataccgtacttcaaaatggtcaaatttataacaatgatgcattagtacaaacaggtacagcacttgcgaatatcggtaagattacatttaattatcgcaatggagaagtatcgaatattaagccgtcattgattaatgttaaagacgttgaaaatgtaacaccgaacaaagcattagctgaacaaattaatcaagctgatcaaacatttagagcacaaacagcagaggttattattccaaataatacgattgatttcaaaggagaaagagatgacgttagaacgcgtgaaacaaatttaggaaacgcgattgcagatgctatggaagcatatggcgttaagaatttctctaaaaagactgactttgccgtgacaaatggtggaggtattcgtgcctctatcgcaaaaggtaaggtgacacgctatgatttaatctcagtattaccatttggaaatacgattgcgcaaattgatgtaaaaggttcagacgtctggacggctttcgaacatagtttaggtgcaccaacaacacaaaaagacggtaagacagtgttaacagcgaatggcggtttattacatatctctgattcaattcgtgtttactatgatatgaataaaccgtctggcaaacgaattaatgctattcaaattttaaataaagagacaggtaagtttgaaagtattgatttaaaacgtgtatatcatgtaacgatgaatgacttcacagcatcaggtggagacggatatagtatgttcggtggccctagagaagaaggtatttcattagatcaagtactagcaagttatttaaaaacagctaacttagctaagtatgatatgacagaaccacaacgtatgttattaggtaaaccagtagcaagtgaacaaccagctaaaggacaacaaggtagcaaaggtagtgagtctggtaaagatacacaaccaattggtaaagagaaagtgatgaatccagcgaaacaaccagcgacaggtaaagttgtgttgttaccagcgcatagaggaactgttagtagcggtacagaaggttctgatcgcgcattagaaggaactgctgtatcaagtaagagtgggaaacaattggctaacatgtcagcgcctaaaggtagcgcacatgagaaacagttaccaaaaactggaactgatcaaagttcaagcccagcagcgatgtttgtattagtaacaggtataggtttaatcgcgactgtacgacgtagaaaagctagctaaaatatattgaaaacaatactactgtatttcttaaataagaggtacggtagtgtttttttatggaaaaaagctataaccgttgataaatatgggatataaaaacggggataagtaataagacatcaaggtatttatccacagaaatggggatagttatccagaattgtgtacaatttaaagagaaatacccacaatgcccacagagttatccacaaatacacaagttatacactgaaaattgggcatgaatgtcagaaaaatatcaaaaactgcaaaaaaacttggtataataagagggaaaagtgtgaacaagttaataacttgtggataactggaaagttgataacaatttggaggaccaaacgacatgaaaatcaccattttagctgtagggaaactaaaagagaaatattggaagcaagccatagcagaatatgaaaaacgtttaggcccatacaccaagatagacatcatagaagttacagacgaaaaagcaccagaaaatatgagcgacaaagaaatcgagcaagtaaaagaaaaagaaggccaacgaatactagccaaaatcaaaccacaatccacagtcattacattagaaatacaaggaaagatgctatcttccgaaggattggcccaagaattgaaccaacgcatgacccaagggcaaagcgactttgtattcgtcattggcggatcaaacggcctgcacaaggacgtcttacaacgtagtaactacgcactatcattcagcaaaatgacatttccacatcaaatgatgcgggttgtgttaattgaacaagtgtacagagcatttaagattatgcgtggagaagcttatcataaatgatgcggttttttcttgaaaaatttaattagatattagaatcctttaatttatttgaaaatcagaagtgagtaacaatggtaagtgaaatagttagtgcaataattggaattatagggatttattgagatgtatggagatgcggggcatttatcgagtagattacaattagagcatgtaggtgatttgctttttcatgcaagtaaagataaacttttaaaaatcctataagaatttagaaactttagaataactaaatattaaaaaaatatcgtatgaaagtgaaattaggatgagagaccatagctaaattaaaaattttagcaaaaactaacttaaagactgcgagtaatctttaagttaggttaaaaataattaatttaagcaaaattatctgctttttgtgatcgtagccatctataataatcttttgctagtagttgatagacagtgtcataaaagtctctattattgctaaacattttagagtatgcagcttctccttgattatattgatcaatcaagaagtcttggaattgttgttggaataaactattcgcaaacatttcttcgctgttgttttgagccatatttacaagtttcgcatctgtattgtttatcaatgtttctcgcatgtttttaacgagtactctatcgccttgagtaaaatcatttggaaaacgttcattgattttgtgtataatttcatttaaagaatcgtattcttcttcaggtctaacagttgcattcacttctgaaggatgagccaattgcccattttctacatcttcattgacgagtgctatatctcctttgaaatcttcctgcaatttatagtattctaactttactttgtcttcaatatcgatatagttgcgttgtttttcaggaataaattttaacaagaaaccagtgaaaatactttcttctagtaactctttatcaaaagtacgatcaatttgagcgatatagttataccatttgttgaagttccttagtgtaactctgaaatcgtattgaacatcttctggtaggtcactgtatctactaataacggggcgtaacacgctactcaatcgaccaagtaattgatcattttgcttttgttttgcttgacgatttaatttcattactgtttgaatatcatcatcattgtatatatggaatttacgtagtttactctgtgtatcataaattaaattaatattaatttcttcttttagagaagttgcttcgtaaaaaggttggaatgcttcatatatttcttctgctgtatttacaaaatcaagaataaaagtatctgtttttccaggcatagtacgattgaggcgagacaatgtttggactgcctttactccgcgtaatctcttatcgacaaacattgtatgaagtaaaggttcgtcaaatcccgtttggtatttttctgcgacaattaataaattaaagtcttcactatgaaatgcttctttcagttgattttcttggatgcgttctccagaatgtgttaagttcatcttcggctctgtatattcaattccatcatcttctacagtacctgaaaaagcgactaacacatccatatccgtgtatcctttttctttgatgtactttttgaactcttgcatataccgtacggcgtggagtcgtgaagctgtcacaatcattgcctttcctctaccttggactgctttttgtgtcactgatctaaattgttcaatcataatctcggctttttgtctaagtacccaaggatgaagagattgatatttagcgatagctcgaactgcttctgtttttggcaattctgggtcttcttcaatcgatttcgcaattttataggaagtgttgtatgtcatataattttgtaaaacgtttagaataaatccttcttcaatggcttgtctcatactataaatatgaaatggatgataggacccatctgcttgttttgttccaaacatttcaatcgttttctctttcggtgtagctgtaaaagcaaaaaaacttaagttgtcgtgttgaccttgggacagtaatgtttgaacaatttgatcttggtcatctagcgattgatcttcaacgctttcttcaaattcttggtattcctttaaagaagcttctttgtctgctaacgcatgttttaatttttgtgcactgcttcctgtttgagaagaatgcgcttcatcgaccaaaatcgcaaaacttctacctgctgtattatctatttcatcataaattactgggaacttctgtaatgtagtaataataattttcttttggtcatttatagctgtttttaaatcttgagaagttttattatctccaatagtttcgacttgcccaacagtatgctcgaaactcattaatgtattttgaagttggcgatctaaaacagtacggtctgtaacaacaatgaccgatgaatagattggttgatcctcattactatgcaaggaagcgagatggtatgccaaccaagcaatactattagacttacccgaaccagcagaatgttgaatgagataattctttccaggaccatggtgctgagtatctgatattaattttttcacaacatccagttggtgataacgtggaaaaattagtagttttttcttttcttctaaattcataaacctttcaaaaatatccaataattgatagcttgtgagtacattctcccataaataagaagtagggtatccagatggattagatggatttcctgcacctccaacacgaccaggaccattagatccttgatcgaatggcagaaagtaagtgttcccttttgcgagttttgttgtcattaacacattaaaatgatctactgcaaaatagactaagaatcgagagttaaattgaaaaattaattcctttggatctctatcttgttcaaattgtaatctcgcatgttccacattttggcctgtatattgatttttaagttctaatgcaacaagaggaatcccattaatcattaacaccatatcaatagtgtttctatacttattactatattgaaattgtcgcacacattgaaaacgattagcttcataattttttatattttctgtatttaaagatgatgcaggttgaaagtaaacaactttaaaagagactcctcgatctctgatacctttacgaaggacatgtaagatgccgtgatttgtgatttcttcatttagtcgttttaaaaacttctgttctgcatttgtacgatagattgatacgtatcgcttccaattttttggttgagtttgttttacaaattctaataatactgttggatcgagtgcgatatttgcatcgtaatgagtatcttgaaatcttactgactcccatcccccgtactgaactagactcgcttctatatcttgttcaaaattaatttctttattttttatcactgatatcactccttacacttcttttttacctgtgacatactcataaattaatgatttcttataattctctaactctttaataacttttgttttatcttcaatgagcctatcgatagtagaaactttatcatctagatattggacgatttgttgttgttcatgcaatagagggatcgcataagaataattatagaattgaccttgatatagatgtttaatggtgctagcaccttgattattagaattgtaccaattccaaaacatatttgataacaaattataatacataaattttttattaatagtattttttaatttttccctaatcagtagtacacctgaatttaatgaaactttttttggaacatttgttgctaaagcgacttttccaatcgtgccgtctttagtgattaataaatcattttctttaatatgaatatctggagcttcttcaaaacgttcttcactaattctaacgcaagaatcccacctgattatgccttttttgaaatcagttcccgttatgagatagggtcctacagtctgatattcgttagaagttaaaccttgccatccaatacgcccttttaaattgaaatcatgtttaatttttcgaacactccaatttgaagggatactaccaatccaatcattaccactttctttcatttccacattcgggtctatgccttttgtcaccgcttctgtgatgagtgattgtttgtattttttaagttcttcgatagattgatatgttgtgtctatgatatttgagataatttttaattggtaattaatgtatatttcaatttttttaatagtttctttctcaggtaacgcaatgataaaattttgtatatctgtagcagatatgttaggttgagctgatcctgatgagaataagttaatatattcgctaaataaaccagtatttatataataataaataaacttactaaaagaagaccttatgattcccactctttgatttatataatataaatcgtctacttgttctatcaataaattttttccagttgttcccccactcatagcaaaaagaatatcattattttttaataaatatttagttggaaatttgagagattcgtttgagtaagaaaggttatcgagaataatctccttggtattaaatgacttaattgttattacttttttattattatctgaaatcgtgaaaagttcacttttaaaggcataaccacttataaagtcaataatatttttaagcttagtaatagtccaatactttggtatatatccaatccactcaattccgctgtatttcatttctctactcatttgtatccacttcctttccagataatgcttggaagtttttaataatagactcttcgagttgtttaatacgttctgaaataacttcagatggttctggtggtgtatatttgtaaaacaatctagtaaatggaatttcataccctatcttatcttttttacgatccatccatgcatcttgattaaatggtaatatttcacgttcaaaatattcattaatatcttctgttaagggaatatcttctgtatctctaaggttcgtgtctacactcttgcttccattctttttataaacgatatctccgttttcgtctcgttgcggtcgttcaatagtcactcgagtaaaaccaaatgattcattcttaagtatttttgactctacagttccatctcctagatagtattctttatcattaaattctccataagcttgcacaatcatttctcgacatgcttcagaaatatctacgcgtttttcaccaatattcttacgacgtttttcatacatattggacgcatcaacgagttgtactttcccttgacgttctggagatttatctttagtaataatccaaatatacgttgaaattcctgtattgtagaataagtcgttaggaagttggattatgccctctaaccaatcattctcaattacgtactgacgaattaaactctcgccagcacctgggtttccagagaataaggcagaaccgttgtgaataattgccatgcgtcctgtttcctttaattttgaaataccattgagttgaaataacaactgtccatcactaactcgaggcaatccaacaccaaagcgaccgagttcaccaagttcatgttctgcttttactgctttttggtcctttttccaatcgacaccaaatggtgggttggagatacagtaatcaaatgtaaatccttcaaaccggtcgctcgttaatgtacttccaagcgccatgttttcaggatctcccccacgaatcattgtatctgctttcgaaatcgcataagtttcaggatttagctcttgaccaaaggtagctacttcggcagtatcattcatatcgtgaatacgttctgtcattgctgagagcatttgggaagttcccattgtttggtcgtagacagttttgaaaacatgttctttaaacaaagtatctttatcttcgataagcaataaatcagtcatgagataaatgatatctcgactcgtgaagtgtgcacctgcttcctcgttatagctttccgaaaattttcgtacaagttcctcgaacacgtatcccatatctgtgcttgtcattttgtctggacctagatatgcatctgctttgttaaattcttgaatcacataaaatagcacgtcattatctgccattgtcgtaatttcaacgtcgaacttaaagttattgagaatatcttgcatgttttcagagaaaccattgagataagctctaaagtttgattcaatatttgctgggtctgcgagtaatgtttcaaaagtatataagcttgtattataaaatgaataccctgaagcgttcttcaaaaggcgttctcgcattacgtcatttattgattgggtattttctgcagtcttaagaactttgtctcgcgtttttagtaatgtatcgtgaagacgtttaatgacagtcattggtaagataacctttccatattcatgaggtttgtataaaccccttaaaatgtctgcaacattccaaataaggtttgcttgtttttgaacattaattgatgtttgttgatgtcttttaaattcgctcattatgtatatctcctttaatagataaaaaagtaaaattctctatttctatattatcagagatagaaacaattttttaaatagttcttaaataatcctattatgttaattaaaaatagaaaaaaatagtaataagagcatccctcaccataaaagtgaaggatgctttagttttattagaatatagttttcattttaatagataatggttaataattgtctgtaaatcattattaaggaccgttgttatagagtcatcatccataaaatcgtcatagattttatcaagtatttcttcatcttcaatcgctgtaaaatgatgtactagtccttttacgatagatatataattttgagatgctaagcaattaggaaccgttcgccagtctgattgtgtagtttcatggttcataggtaagcctcctttatttcaatgtccatttttgacgcgctttaggattgagtggatgcataatttcatttgttgctggatttatgagctttttgactttctttttatgaggttttaacatttccatcacctgtgatacacgttctataacaactggtcgcttagcataggcgccataagctagaatcactgtgtcactttcactaatcgtcttcatcaagtgaatgtctgtgtgtttgtcataaggctctttgatatgtttaaggttctctggggttttaatatttgaaaatagattcacaagatatacagcaccatattgttcagaattcgctaattggttaagaataagaacagtagtaagatcgagtgataacacaccatctaaatgggggtacatcgttatcactgtacaagctggtttcttttcatcccaagttttcttgagtaaatagcggtgctgtttgtcatcgctaaatatggcttctgtgtgtattgtacttttaattgtattcatatatcatcatttcctttagtattcttctggtaaaagcatcacataataaaaaacgtctacatcatcttctcggatgacgtagactttcttaggtaatgcattttgattttttatatagtttgtatagtgatattccaatttgtatgcgggttgttcttgttcatgtgtgattgagagtatattttcatcttcttgtagtttaaaaatgtgtaggtaatctgtattaagttgattgtctcgatcttttaccatattccaaagtaggatttgaaggtctagagatagttgtttactaatgccttttgtgatgtatcgattgattttcatactattttcctccattttgcttttctttcatgatgtcaattacttcgttaataactgtaacagatagttgagcgatcttgatccagttcatattattctcctcctttttgtaatagatgacgttcatcgataattgtatttttagtatctgtgaggtatagaaagtccatatcaaaatgatccagataaccaatactgatgagttggttattggcgtacataagaaatggatagatacttagctcatgtagttcatcgttatagtaggtataagtttcaagtgtaagatgcgcaagtggggtatggtctacaaagcgagtaggaagtatattttctgctgcttcttctaacgcttcacattcccatgtttcattgttagatagttggaatagacgagttatatattgtttgagttcttgagtggttgttttcatatcattgcctcctagatagtgttagcgatgtatttcatatacatcactgagataatatatatttgatttatcatttattacgaatcccggtgggaataagagaaaatcccatatgaaaaactgctacaaacattgatatgacaagaaaatcccgttatcccgctcatttgttgggaaatataggtatatatttatatattatttggatttggtggtgttattacgacttactttttctttttatattatttatttataaataataacgggattttgggattacgcttgcgtaatccttctcctacatgaagttagccaatcccgttactatcccacttatattttgttttgggatgttctttcgtcatatcaatataagcttcacattgagccatgatttgttagcgtgttgaatatatttgttagatgagtgttattgaatgacgaaaggacagtacatagatattatatttgaaagtagagtgtttgaggcaaaaacaaagacgaagtgctgaggagcacttcgtctagattgttattattaaaaagttgtttaataatttcattattgagcttgagagtgacatagaattgttttttatgattctcgtctttacgaatatcaatacggtcaataaccgttaggtataatgctttgagctgtgatttatccatggattctatattttgaaatattcgttgtaatagggcagcgatttgtttcgtatcataagatggtttctcttgattttgttgctgcttgagttgattcatttggtttgtaatatcattcagttttgtttcatattgatgaatggttggtttgagtgcagatgttaagtctggattgtcttcgatggtttgaacgagatttttaagtttgatgtttacttcatcaaattgttgttgtttataagcaatatcatgattgagtgcagctacatcgacttgattatcttgattaacacgttcgacaacttgtttgagaactttatcgcttttgacaatttcaagtatttgatccataacgtatttctcaatgacatcggctctaacgctattcgcagaacatacttttgagcctttgtttcggaagttactacaagaataataacgtattcgcttcttagtaccatctttcaatgtgttcgttgtgttactagctgccattggtgcaccacattgtgggcagtgaataatacctgttaatagattggttcctttcccatgaacttgaggtttttgactgacctgttttttgcgtgattggactttatcccataattcttgactaataataggagggtgtttaccatcagctataataggtttatcatttagtcctttacgacgcttttcattccaatctttgtacttcgcaaattgaattttaccaatgtagaatggattgactaagatataggttattgaattgatactaaatggattgccttttttagtcacatagcctttgtgattgagtgcattggctattttacgataaccatgacctttggcataagattcaaagatatatttaacgatgttagcttcatgttgattaatcattaattcttttttattatcaggtatgttattatatcctaatggaagattgccttgataatagccctttaaagctctttgatgttgcccgttgtaaatattctctaaaattgtatttctttcaaattcggaaaaacttgcaagtatctggagcattaacttgcctgttgaatttttgacttccatacgttcagacaagctaaaaaattcaacattttgacgatgaagttcttcgacgattgtaagtaaatcggaagtattacgtgccaaacgatttgttttataaaccataacacagtctaattttccatttttagcatcatttaacatgcgctgtaattcaggacggttcatagattttcctgatataccccgatctgcatatatatcaacgagttcatagccgttgaattggcaatattgctctatttgtgtaatttgtccctcgatgctataaccctctacttgtctctctgtggacacgcgaatgtagcctcctacaagctttttcttcattttatccattataatccatcctttctttaattatacaattgataatttcatagtctgctttacaatattcagtggttcgtttttgaaatagatgccagcgaggcttttatttttagaaatattaatttcatcaatataggggtacaacatgtttagcgtgaaacgttgttgaatgatgttttggaaagcttttcgaatttgatacgcactgattgatgatataggttttgattgttgatgtaatgagtgcgtttgttctttgaacgtttctgcatcaattttgccttgggctaatttttctatcagctgctcgtgattgagtgtagttttaatttctatatctctttgtcttttgagtcgttgttgaatagtatggtttatttttgaatagagctgttgattttgaaagaagtcctgacaagtcgctaaaacacttgtttctaattcttgtgcgttgattcctttaaattcacaaacaaagcgagcgttattcatattttgcggacagacatagtaacgcaatgaatgatctggttttcggacagtcatgtttgtgagtgtcgaatgacaatagggacatttgattttttgtttgagttgattttctgacggcttacattttacttgtttctgagttcgggtaacttgagcttcttcgtatatcgttgtactgacaatagctgggaacatgttttcatattgtccgtattgattgataacacggccacagtaattaggattgaggataatattacgcacttgataaggcttgcgattaatgaagttatcatcagcttctaagtattgcgcaatttttttataaccataaccttgaaggtaataattgaacacagcttttactgttggtgactttactgtgtctatcgtgaaagtaccattatgatagtgatacccaaagggcgcatgtgttgtaattagtttaccttgtctcgctttttctttgattccatttttgacttgttcgcctatattatcagattctagttcggccaagctgatgaaaatattgagtttgagccgatcgaatgctttatccatgtcgaagtagccatcatgaacgcttaagatatgaacatgatacgtttgacataatttcatgagctttaatgcattttttagattacgatgaagtcgatttagacgatagcaacataatacgtcacattgtccttgttgaatcagttcagtaatttgttgataaccattccgcttatcagtacgtcctgattgtttatcgctataaaaggtaatgtgttgaatattatgtttttcggctaatgccttgatggtttgtttttgtgctgctaaggattgttgctttgtagtgctctgtcgtaagtaacctattgcttgtttcatagtatttcctccttccaaagtgataatatatatttatgaacgaatttatagatgagcccaacacctgctggtgttgggcgttattattagtcatcagcatgattaatttcttcaacaactaaatcagctagtaattcaatcaattcatccattttatctaatcctgtacgattgcatctttaagttattaaaaatcaattaaatcatcattctgttttttccatgattcaagcatctttttgttatccaagttaattttagctttaataggttcagcatctttagttagaccaaaaatagacgcatattctgaatctaactttaaatggtaaaaaacaagtgactgtttcttgccatagtcatcttttactgttctttttgtcgtgattcgatcacggtcagattcgataaatcctttatctcttagtgcattcacgacattgttgacatcctgaaagtgttgttctttcagcatatctttaaatacagtcgcaatgattttgacctcgatataatcatcttttaaggcaattagtccataattctcaatcatattctttaacgctgtgtcatcagaaaacttaccacggttttgtgctacaaattgtgtaatgacttcaatcgctttatctgccagtgatcgttcagagactgtatgagtatgataatcaataaagtagtctcttattttagcgatatcaatatttgtagctaaaacacgacctaatatttgcgcagatgttgtaatgactgcataacgcttaaacatacgaatacctgtattgtttgcttcactcttcaatttagctttaaaccaatgatgttcatctttaaaccattgaataacttcctcttcacgatttataaggtattgagctactaacggtaaaacatgaccatagtttagcgccacagcttttttaatattgtcagcattggtcgcatttgtagtaaattgctcattaatttcaatggttcttacacgtaacccatcgttttgagctgaatcagtaaaaatactgtattctgacgttgaaatgacagaagttccccaattcttaggtgttttaacttctccatgaacgtttgaacgttgacgcccttgaccttcagcgatggagtacaataaccctgttgtatctttaaaagttgctgaggagagctcgtcaaataccataggtatgccataattgttactcaagtaaccttcaagagcgttacgtgtgccattccaacttcgaaaaagcgttttattacctttggttggatttccagcgacggataccgctaaagctgccgctgttgatttaccggttgatgactggcctgtaaaactaaagatgataccagcaaattcaacctcatgtttatgcttcagaaaggctgtcactaaggcagaaattccaaatatgaccgctaactctagaagaagatgacctttgacttcgttcatatacatatttaaccaatctttaaatgtccctttaggctctaatagataagcactatcgacaataggctctaaagatgctaactgatcatattgtttagatgtgtaaacggtatctaccattacaatgtaaccgtggggtgtttctatgatgcccgagccatcatataaatcagaagtgggcagttcatcgcgcattaactgtagtgcatagctcaaatctcttatataactttcattgatactgtgaccatatttaatcaaggaaggtaagtttcgagttgttaaaatatcagattcaaatgtatgttctttatccttaccgttagaaataattattttttctgtattttctgaggcatgccaaaatttagcttcaacaacgatacaactagatataggcactactttttccttatctccatcttttttaggtggaaaagttttacgccacgcctttgcatctaattggtatggacctgcttcaaaaatgatgtaatgactcattagcgaacacctcctttcgaagggttgctatcttggagtggattaggtccgactttcatatatactaaatgaccattggtatttttaccgataataataaatggaacacttggcgcatttttaacaaaatatgcgaaccaacgtccaacattttgttgtacagcttttgagcattgtacatttgcacgacggttcaagtcatggaaagtaaatacttgtccctccggtaaaacgaatccaattcctaaaattcttcttttcaacagtttaaaatcatcttcttgctcgtaagtcatttggatcatcctttgtatattagtcatcatttaaatgatgcctttgtatcttatatctacactgagatataaagttctaaatttgagaggaaaatattaggacattggtattacaccttttgttaattaaaaaacccaacgataaaaaaatcgttgggtttaaaaaggtatgttaataatataatttagatgcactattcaatttttttaagcgtaatttataaaaatcattaattacctgaatcattaatttatcaagaataccattgtaatcgttattaaaagtctccctactatatatttcactaatattataatcattaaggtttgaaattaatgaatcttctattttcattgttagttctgggtgctgttcaattgtattgcgaactaatatttttaattgagtatttcttacataaccattaataagactttcgaaacgaattaaattttcttcgtgtttatctattattgtattcaactcattttttaaactattcaaactgtgtaaggcaattaatatatcgtattgagatgcttcttcgataatacgacttgaaacattgactactttatcaattaaatcagttatagcagtgaataatgtaaaatgaaatgtatcctcaattgttgttaaataaaataactcattattactaattaacttatttttcttcataaatttatctatattatttttagatttaataatatcgtctattgttaaattaactttacgtgaactttttttcataatactacggataaatttgaagtaagtatcattatgatcgtatagattaagagaaataccaattacagcctgtctaaattgatctatttcatcagattgatttaagctattattattgtgagatgaaggtttgatactattagctatttcaaagtattgagagttactctttctttctctaattaaaccttcgattactaactttttaaaatactgagatttatttatacttgagatatctttttttacatacgaatcttgtttttctttataaatgaggtatcttgttaaaaagtcgcttattataatatcatcaacattttttaacgataaatctcggtgttgttttaatatcgtatgctttaaatccttaaagctttctaaagaagagacttgatctgcatttttcatataacttacttgctgtttaatttgctctaactcaatattttttcgaatttctttcatagctttgttagctatttttttagcgaattctgttgtatggttgattgtttctaagtaatcattaaaatatgtttctaggtcatttaaatctaatatattcaaaatggctgtaccttgatcaataaactcatttaataagtctttaatatcaattttactttgactatcaataaaataatgcattttattttttataaaatgtttagggatttcatctataaaaaaaccagttttgtcacattccacagtatgttgctccacagtttgttcatcctgatttataaaataacttacatatatagtttcgctaggttgggcttttccacatataaaatttggtcggtattctttaggtaaataatcctctaagtattcttctaatataaattctgaatcaattttatgtataaaataactaaaattccgaaaccacatttctattttccatttatttttaatcatagtattactcactttcaataattaaatgtatagacataatgctagttttatttttaagatatttcaataatgtttactaatttttccctataagataagatatacaatataaaagggaacaaacgttcctattggaggggtcctatgaaaaggtcagtcgagtctttcagtgagttacatcaagttttaaagaattatagagataatagcttatggttatttagaggtcatagtaatttgaattggagtttagttccgaaagctggtcgagcaccttatgataaatatgatgatgaagaaacattttatgcttggaaacgtcaagcaatgatatttttaaaagagacttatagtgattgggatatgctaactatagcgcaacatcacggattagctactagactattggattggagttttaatcctttagttgctgccttttttgcggtgcaaacatatgaggattgtgatgctgttatttatgcctatttaaaaaaatcggatatgaatatgaaaggggctacgccttttaagagtaaatggataaaaaaagtaaagcctaacggtctagcttcgagagtggttagacaaagtggaatttttactattcatgagcctcctacaaattctatagaagctaatctttcagagaaagaagaactacacaaaatcatcataaagaaacattatcgcaaaaaattaagagaagagttatcttattatggtatcaacgaattatcattatttcctgacttagatggtttatctagccatgttaattggataatggagataaatccatacgcttcaaataatataacgcaagaattaaattcaattaatgaataagattataaaaagcgaggtattatatgtcagtattagaaactaaattaaaaagtcaaatgtcaaaatctgcaaaaatagctagaaatatgaataagttaccagatgaaattgatagattaagaaaaaggatagaaagaataaataaaaaaagaaaacctacttccagtaatattagagatttggaaaaatctaataagcaattagttacaaagcagcaaaaacttgcagatttacaagttgagtatactaagattgagaaaaaaattaatgaaacaaaaattaatcttcaaaaagagcagtctaggaatcaaaagaaattatccagtatgttagataaaaatacaaaaggaaatgaagagattatggaaaaattattaactaattcagatcaaataaatgagatatcaaatcagataaaaaaagcagtgaatcaaaaagagataattgaatatgatgtctttctatcccattctagtttagataaagaagattatgtatctaagataagtgaaaaactaatagaaaaaggactaaaagtctttgaagatgttaaagtttttgaaatcggaaaaagtcaaacagaaactatgaatatgggtatactaaactctcggtttgttgtagtatttttatcccctaattttattgaaagtggttggagcaggtacgaatttttatcctttctaaacagagaaataaatgaagagcatgttattatattacctatttggcataaagtgagtgttgaagatgtacgtgcatacaacccatatttagtagataagtatgcattgaatacaagtgattttagtatagaagaaatagtagaaaaaatttatcaagtaatcgttaattctaagaattagtaatagtattggttatctactttaaaagcaaagagggaattaaatgaaaaaagcagtgtttttattactaaatgagtatgcagaatggtaagcaagctactgttcctctattttaaaccaaagcagtgaatggaaaatagaaacaacttcaatttatgaatattttacctcgattggtggatttacaattaaagtagtaatagttatccaatattttctagttgattctcttataatatgtccaattaagtgtagatgattcaagatgatattgagggaaggatgagaatgtgtctttcaggtagctcatttgatgataaccttaaacataatatttactttcatcctgctgaaaaagaggttacagtttcaagccgatagaatacattgggttatataaagacaaagcaataaaagctatcggaaaagtagacaaagtaatagtgacggaaataaatgagagctcattatccttgaagacagtttatcctgtaggtactgagttatcgattgatgagtacgaaatagttaaaaataaaataatggtgcttgggaaagaaaagtggactaatctattgaacgaaccccattattattacttaattgaagattttatagagacagactacaagaaaacatctaaaggtggattgatgggagttaagtattttaatgtgaatgaaattttgaatagggattgcttaaccaccgaacaaatcgctaaagaattatgtaataaagattgggaatgataaatagtgaatgaagctataatgcaataatgtatgtataacataatcaagtaatgaatttaatgataagagagtatggagtaaagaattgaattagtttgcatggtctatgtatcttaaaggtgttgaaggagatacaccgaagtatgcagtaccaattcttgaaacagactttagtgatttaccatctacacatacgacagtcggatcacttgatcggtttcgagataagacaatgagcattaacagaagcgggagtaactgttgaattccatttatatccagttagatactagagtttgaagtgataaatcttgattcggatgctgaaataagtaaaagagcagttactgaatataatataagtataaatatgccactagatattttaaggagtatttattcacttttataaaatcatctgctaagatagtatggaagatttttataggagctgattataatgcgacatataaatatgtcatacatcatacgctatagtactctaactcaaagataagaagtacttagttatgaatagcattcatttcacaaagtacttcaacaaaaatggaggaatatgaaatgaataaaatagaagtgtataagtttgttaaagtaaagcagttagtatatcaattgattaagttatatcgtacaaacgatatgaattcccataaaacacaaaaagattttttactaaatgaaattaatgatatctttaaagaaaaagatattgatatctcggactttattacatcgattgacgatgtaaaattaactaagaaaaaagcagaacatcttttaaatgaattaaaagtgtacatccaagattttgaaataccttcatcaagtcaactggagaaaatttttcgtaaagtaaaaaaattaaagagaccagatataaatttaattgatacaaaagaaatttcatatttaggatggaatgataattcttctaaccgaaaatatatcgtttataaaaatttagatgataaattcgaaggtatatatggcgaaatttcaccaaataaagtaaaaggattctgtaaaatttgtaatcaggaatctgatacatcactctttctcaataaaactaaacataataagagtagtggaacatatactaaaaaaggagattacatttgttatgacagttttaaatgtaatcagaacctagatgatataaataatctttacgaatttattgttaaaataaaatagatccaaacagccctgatctttagaactaatgatcagggttgttatattttgtacctcactcttaatcgatacgctgaaagtccctataaatagaacgtacgttccgtttgtagtataatgacaaaaatattaaattagaggattaaaaatgggattataattttttaatgtaccaaactgaaaaaggctaaataaagataaatataagattagaaaaaactgtatggattaggcaatatttatatataatgaaatgaattaacagaaaatcgaattatccggaaaaaccgtactgttcgattggaagggaatagagaaggtgaaaagaattaacttcaattatcatcttatttctgaaaaaagatatgaaaaacggacgcaagacactttaaatattagtaacaacgtaaagtgaataaaatctatattaaggcatcgtgatgaatttaatataattgataaaaatgattaattatccattttatttataatatattatttttagcaattgtatgtatatttttcttgatttactctaatagtacagaaactataaacaacaatcttctaaaatacgctgaaagttatcataagtgatggtaaaaaaatgagtaagtagatgaagagtgaaaatcagattaattaataataatgtatcaaatttaaataaagggggtctttaagtatgaatttaagaggtcatgaaaatagacttaaatttcttgagaaatatgatgtgacacctatatcacatttaaaattattagaaggtcaaaagaaagacggtgaaggcggtagactgacagatagctattattgtttttcatacagtttaaaagataattctaaaaaagttttaggtacgtttaattgtggttatcatattgctgaagatttactaaaattatcaaatcaagacaaattacctttatttaacccgtttaaagtaattaataaaggtaatcaattgcaaggcgtaacgaataaaggtaatttagatattaataggcaaagaaaacagtataatgaagtggctttacagctttcaaacgctattaatttaatcataatttgttatgagggtaatattaaagaaccactttcaacgataaaatacgaaaccgataaatattattatagtgaaccatatgatagtaaaattaaagcagtaaatactattataggtaatttgtttgataagaaattagttgagaagatatctgaaattaatgtaaatcaggaaattagaaaatttgatttttcattactcactaataaaattaaaaaatatgagatacaaaataattttgaataagtggaggtaagtcaatattaaatatagaagctagtattaaggatattcaagatattataaattattttattaaatgtgacgttaataataagtattatgaaagtaagcaaagaagcagtctcgaaaagttagctttaaaattggataaagtaagtaatcagttaaacaatgaaaacattgaaggtatgaaaaagataattgaaaaagtagcagaagcaaatagagttatcgctaaatcttctttaagaaaaaattgagtgttttagtaagatgattgaagttgataataaatctactaatcaaaagaaattttaaatatatattgagttaaaacttgaaaaacttatatctaaatgaagaaacgggaaaccattctgaatcctcaccctttcccgttccaaaatcattgataatgaaaaacatcgcttatacggggtattgcatattttgccttaagttcaaatactatacatataatagaatcacaactaaaagcacgtcataactgtactgttcattctgtacagtaggtattaaactattaaataggtataagattaaacgaaagccaagatgcataatgtcatggctttttatattgaaaaaacatgcgataatttgttcccaaatgtccttatagttgtaccaatatctgtaatagaacactagaaacttggtttaacctttccttttcgtaaataaatgtaaagatataccataaggatctcttacataaccataaccttcagtatagaactctgggctgaatgcttttaatacttcactgcctttttctattaactggtcatacacacgcttagtttcttctacatggtcaaaagtaatacaaagcgatatattattaccttgggttataggtaaaccttcggtatcatccgcaatcataatttttatatctccaaattgaagtacacattgatcaattttatttaaatcttttttatcgatattaagttgcttatctgtcggtctatccttgatacgttggatatacagtgttttagcgccaaacagctcttcatacaaccttttcaaaccatctgcattttctataattaaaaaatagggacttacttgaaaattcatagtttttcctccttaaatttgttataaataagtatatactgtattagtgtcacctattgatactaaaaggggaataataatgaaaaaatctgttagattatatcatatgattgaatactgtaatgaaaaaaggaatttcaagttaaatgatttaatgtcagaatttaatatttctcgtagtactgctttaagggatataaaggaaattgaagcattaggagtgcctttatatagtagtacagggaaaaatggcggttatatgaccataggtaatcgaaaccaaacgaaaatagcaatcacagacgaagaattgaaagctttagtatttacactttcaagtatctccaatgttagtaagttaccttttcaaacagaatatcaagaaatattaaaaaagttatataataattcgaataaaaaagaattgataaaccagtataatgagatatttcaatattttaatgaagatacatatcagttcaaaagttataagatatttaatgaaatcattagattaacaattggtagtaagtcatttaaaatctgttattcacaaaactatttgaaagaacaatataaaggtattggtatcttatataaaaatcaacaatggtacttcgttgttgttaatatagcatcaaaattagtaaagttgttaaacatttctaaaataaaagaagtatatgaaatgggagaaactaaagaatgtaatgaaataactatgcagaattttcaacagtttatggttgaaaacgaaaatacgattgatatacaaattagaagtaatattattggattaaatatcttgaaaggatacttgtggagtgactatatgattgaaaatattaacgaagagacatatttgtttaaatcaaaagtgaacatgcaagatataaattttatagctaaattaatagtcacatgtggtgccaatgtcaaagtagaatttcctattagtttgaaaaaagctattaaaactgaactaaccaaaataataaacttatactaatggtaatttaattatgattgcaataacaaagaaaagataatcttaaacatattaaattgatccgtagtttaaaaaccgcatcactaaccgagacgcagaggcgtatcataagtaatgaggttcatgatttttgacatagttagcctccgcagtctttcaagtaaataatatcgaaatattctttatagtgaatatttatagtgaagcaaagttttagctttgagaaaattatttctgtaaataaatatagtaaaattacggtaaaatataaataagtacatattgaagaaaatgagacataatatattttataataggagcgaatttccaatgatagacaactttaaacaggtccttaaattaattaaagagaaacgtaccaataatgtagttaaaaaatctgattgggataaaggtgatcaatataaaactttagtccatgataagttacccaagcagttaaaagcgcatataaaagaagataaatattcagttgtagggaaggttgctactgggaactatagtaaagttccttggatttcaatatatgatgagaatataacaaaagaatcaaaggatggatattatttggtatatctttttcatccagaaggagaaggcatatacttatctttgaatcaaggatggtcaaagataagtaatatgtttccgcgggataaaaatgctgcaaaacaaagagcattaactttatcttccgaactcaataaatatattacatcaaatgaatttaatactggaagattttattacgcagaaaataaagattcatcttatgatttaaaaaatgattacccatcaggatattctcatggatcaataagaatcaaatattatgatttgaatgaagggttcacagaagaagaaatgctatatgatttaaagaaatttttagaactatttaatgaattagcttcaaaagttacaaaaacattctatgatggcttagtcaatagaatagacgaaatacaggaagatagtgaaattgaagaaattagaatagcacaaatagataagacactcaagcaagtggaagcacctaaaggagtaattccaaaatataaaaaaggtgtatcaaagactactaaaaatgattcagaaattgaaaaatcaaataaagagaataaattaaccggtaaagttggagaaaaattagcgctaaaatactttaatgatctaattgataataaaatagacgaagataagaaagaacagtttaggaatattttaaatgataatccaggctctcaacacggtcatggctatgatttagtagcttttgatccaacaaatacagatgaagctatagaaaaatttattgaaattaaaacatctatatcttctaatattgaggaaccattttttatgtcgctaaatgaaatgtttgctttgaaagagtataagaagaaatatttaatattaagaatatttaatgtttctggtgaagaaccacaattttattttatagatccgtatgcaaattattctgaatttaaagatgtagatgatctcattgataaagtatttaatgtagaagctattcaatataaagtttttggcgaaaaatgattacttgaacaagagctaaaatagtgatctaataaaatatagaaactgtaatttaaataaaactttctaaataagctaactgataaaaaatcagtttgtccacagtctgaaacaagattcctatattctttaggaatcttgttttttctatttttatggtgataaagagcagataagataatgtggaataatcacaaaaagttaaatattttaagttttgtttaattattaatgattttacatttagattgtcaaattaagctggacagtttaacatcttcgatgaaactcataaatacttccaattggtattctataacctggtatgtcaacatttttttagacatttttcatatgtagatttttaaatgccactggcgtcaaatactgtaatgaagaatgtagtctaaaattgttataccaatttacataatcaaataattctgtttctaactgttctaagttttcaaattacatttgttttacaaattcagatctcattgctttcatcgttgcttccgcaactgcgttatcataaggacaacttttggtacttaatgaacatttgattttaaaggattctaggacttcatctatcaaatgattatcaaagtctttgcctctatcggtatggaacaggttgatttgttcaagattatgatttattctgctgattgcttttgatactaaatttgcgtccttatttttacctgcactgtaaccaacaatttctctattaaatagatctataaataaacatatgtaatgccatgttcctgcgacttttacatatgtcaaatcacttactaatgtctccattggttgttctctattaaaagcgcgattcaaatgatttttaattcgtttttcattagtttcttttggataatttttgtatttagctttcgtataaacagaaactagattatgttttttcatgatacgagctatctttcgtcttgcaccaaagacttttctattagaattaaaaatatttatgacagcacgttctacgtttgaatcatctttagtgattttattatcttttctttttatagaatcataataggtacttcttggtatttttaggactttacacattgccggaactgaatattgatgtgcattcttttgaatgacttctattttcgtcctatgatcagcgctgcttgctttaaaatatcgttctccatttttatatgttgaacttcattgcctaatttaatcagctctttttcttcatctgttaagctatcttgatgattgaatcaacctgtgttttgatgttgctttatccatttccctaacgcggaaggtgttaaatcatactcgcgtataatttcattcctaggcttaccatttttatataatctaaccatttataacttaaaatttgaactaaatgatcttctttctctagtcataataaaatcgcctactttcttaaattaacaaaatctactctcatagaatgtgtccaattaagtgtagacgattcattgttcacctcaataaaattatgtctaggtttttaaaaaatgtacattattaaactatcatttccattctaactactatagcaactgatatctatgaatataaatcttttaatattggtttaatataaatattccatttctagaaacctatattttatgtttgtataaattcataaattgttcgaaatttatatattaaaagttgtttttgttgttttataattaagttaatgaaatatattgaggagttttaaaatgattaataaaattaaaatattattttcgtttttagcattattactttcattcacatcatatgcgaaagcagaagatttacacgataaaagtgagttaacagatttagctttagctaatgcatatggtcaatataatcacccattcattaaagaaaatattaagagtgatgaaataagtggagaaaaagatttaatatttagaaatcaaggtgatagtggcaatgatttgagagtaaagtttgcaactgctgatttagctcagaagtttaaaaataaaaatgtagatatatatggggcatctttttattataagtgtgaaaaaataagtgaaaatatttctgaatgtctatatggaggtacaacactaaatagtgaaaaattggcacaggaaagggtgattggtgctaatgtttgggtagatggtattcaaaaagaaacagaattaatacgaacaaataagaaaaatgtgacattgcaagaattagatataaagatcagaaaaatattgtccgataaatataaaatttattataaagacagcgaaataagtaaaggtctaattgaatttgatatgaaaactcctagagattactcattcgacatttatgatttaaaaggagaaaatgactatgagatagataaaatttatgaagacaataaaactttaaaatctgatgatataagtcatattgatgtaaatctatatactaagaaaaaagtataatcaatgaaaatttctagatcaatgttagtgttaattgtcatgtcttttttccgttatggaattcatttaagcatttttctcaaacaagtacatatactccaaaagcagaaactctaaagaacaagtccgacttagatttaaccgcgttatataatattaaacctgtatattcagaaagtgaatttcttaaattttaaagataaaattaaaaccaagcaactattatataattatttaatgttataattaaataattgaataaagatagtctaaaaaaagagcttaatagttcggaaattgcaaacacattcaaaggaaaaatgtagatatattcggagtacactttggagcaaattgtgttggagaagcaggtgagaatagcgcttgtttatatggtggagtcacatttcacgaaaaaatgaaaaacaacaaaaaagtcaataggcataaatgtatttaaaaatggatttcaacaaaaagggtttgtcattactactgctaaaatcaaacccacagctcaagagctagatcttaaaacgagaaacaatatacaaaatcaatataaaatgtatgattcggaaactggagatatacaaaaaggatatataaaatttcattctactaaatcaagtttctattatgacttatttgattttaaggtgaaaaaacgtgtggatttcttaaagttctataatgacaatgaacttataagtaccaaaaaattacatatagatatctatttgtttaacaagtaaataattggaaacgtttattgataccttacagccatatgggcagacaaaatgtcagtttatcttttcatcagttgtgtaaattactttgcaaaaacttagtaagtgtgggaaagattattaacagagagaagtgacttattttggaatataaatcttacaacaaaatgagtaataatattttatctatcttgttgagtgataaaaatttcgataataaaatggtagtctcaacaggtagttacattttgtctgagttgccatgtattgttgcctataaaaataatgatatcgcggggctactaacgtataaagtttatgatgagtatattgaaatcatttctttagatagttttgtagagaacaagggtattggtagtcatttgcttgattatgctgaaataattgcctcagatatgagtaaaagaagtatcagtgttattactacaaatgaaaatattaaggcactttatttctatcaaaaaaataaatatagaatcacagacgttatttttgatgctgtaacagaagctaggaaaataaagccgtcgattcctacaattgataaaaatggcattgaaattagagatgaaattgttttgacaaaatatttgtaatatataaatatacgttgttttaaatcaccctagttcataccaaaaagactttaacacaaacaaaaaaggaggaaacttaaattcctccttgaccctcatttcatctataattctattttaacgtcttcgtccatttgggcttcaaattcatctagtagtgctcgtgcttctgcaattgattgtgtgttcatcaatgccatatttttctgcaagttcaagtcctgtttttctatcgggaatatcaccgttaattgttaacaatgtatttggtgcaatttcgtcacgtaaatttttaatagcttcgattaattcccaatgtgcatctactttactaatgcgtttgataaaaacttaaataatattaattcaatcatcagtggcattaaatcttttatcatttttagttatagttgataaatttatatttataagcatatatggatatttcatcaaaaatttttatttatataaatccgaactgcatacatatttgtttaaataagaggtattatttttcgggaaattgctgtctgagttaaaaggattagttttataaaatgagttgaattatagcaaaaacgattaaaatactgataatccatttttgtattatgttagggacttttttacttaattttaaccctattggagcaaatataatactccctattataaggaataaggcgtcatataaagggatataaccttgaataagtttgatgacaaaagcaccaattgaagatataaaagcaattactatactattagcgactacagtattcattggtaatttgaataaaaccaataatataggaataataatgaaggcaccacctgcacctactatacctgaaataataccaatgaaaaggccaatgataactaataaatatttattaaatgaagacttttcggaactaggtttcactttaataaacattaatgttaatgcaagtaaagcaataatgatatataccgtatttacaaatgtagcatcaaataaatttgctagaaatgcacctaacatactccctataatcatgccgccacccatataaagaactaattgtggcgagaactctgttttttttcgagcttttaatgagccacttaatgtactgaaaaagacttggctagaagtaagacctgatgcgatatatgcgctatatgcaggggctccgaataatggtggtaataataaaatagctggataaataatgatagcaccacctacgcctactagaccagatatgaacccaccgaataccccaatgagtaacatgataactatattaacaatatccattacttacttttcaccaataagtttacagcttcattaattaactcttgggagctttcttcatcatccgcagctgcttttacacattctattaaattctcactaataatgatacccatcaagcgttggagtgaactctttgatgcacttatttgtgtaatgacatctttacagtcttttccttcctccatcattttaataattccatttagttgcccttgtattctattaatacgattaatcatttttttatcataattcatagtcatacctccacttttaattgaataaaaatatattaatagataaacacaaatgtgtcaaatacccctagaggtatttgacaagttccatccaactgtttaaaatacccctacaggtatttttagggaggttattatgaaacaatacggagaaaagtttatcgatgaatttagtaaagcagaattggaaaaactagccaagcaagggcaattaattgacgttagaacagaagaggagtatgcattaggacatatcaatggttccatacttcatcctgttgatgagattgagtcattcaataaagaaaaaaataaaacctattatgtaatctgtagaagtggtaacagaagtgctaatgctagtaaatatttagctaaacaaggttataacgttataaatcttgatggtggttataaagcttatgaagaagaaaacgatagttatgatacacaagaagaatataaaagtatagaaattaaagcagatcgtaaacaatttaactatcgtggtcttcaatgtccagggccaattgtaaaaattagtcaagaaatgaagaatattgaagtaggtgaccaaattgaagtcaaagtcacagaccctggattccctagtgacattaaaagttgggtgaaacaaacaaggcatactttagttaagcttgatgaaaataacaatggaattaatgcgattattcaaaaagaaaaagcaaaagatttagatataaattattctgctaaaggtactacaattgtattatttagtggagaattagacaaagctgtagcagcgttgattattgcaaatggtgctagagctgctggaaaagatgtaactatcttctttactttttgggggcttaatgcattaaaaaaagtgcaaacagttaatgttaaaaagcaaggtattgcaaaaatgtttgatttaatgttgcccaaaaagaatatacgaatgcctctttccaaaatgaatatgtttggtttaggaaatatgatgatgcgctacgtaatgaaaaagaaaaatgttgattcattaccaacacttatcaatcaagctattgagcaaaatatcaaattaatcgcttgtacgatgagtatggatgtcatgggtattcagaaagaagaacttagagatgaagttgagtacggtggtgtaggcacttatattggtgctactgaaaatgcgaatcataatttatttatctaattaaatctattaataaaaggagttgttatcatgttttttaaacagttttacgataatcatttatctcaagcatcatatttagtgggttgtcaacgtacaggagaggcaataataatagaccctgttcgtgatttatcgaaatatatagaagttgcagattctgaaggtttaacaattacacaagctacagaaacacatattcatgctgattttgcttcaggaattcgtgatgtggctaaacgcttaaatgcaaatatatatgtgtctggcgaaggtgaagatgcattagggtataaaaatatgccatcaaaaacacaatttgttaaacatggagatatcattcaagtaggcaatgttaaattagaagttctgcatactccaggacacacgcctgaaagtattagctttttactcactgatttaggtggtggttcaagtgttccgatgggattatttagtggtgactttatttttgttggtgatataggtagacctgatttattagaaaaatctgttcaaataaagggttctacagaaattagcgcgaaacaaatgtatgagtccgttcaaaatattaaaaatttaccagactatgttcaaatctggccgggtcatggtgctggaagcccttgtggtaaagcattaggtgccatacctatatctacaataggttatgagaaaattaataactgggcatttaatgaaattgatgagactaaatttattgaatcattaacatcaaatcaaccagcaccaccgcatcattttgcacaaatgaaacaagttaatcagtttggtatgaatttatatcaatcatatgatgtttatcctagtttagataataagagagtagcatttgatcttcgtagcaaagaggcctttcacggtggccacacaaaaggaacaatcaatataccatacaacaaaaactttattaatcaaattggttggtacttagattttgaaaaagatatagatttaattggagataaatctactgttgagaaagcgaaacacactttacaattaattgggtttgataaggtagcaggctatcgtttgccaaaatcaggcatttcaacccagtccgttcatagcgctgatatgacaggtaaagaagaacatgtattagacgtacgtaatgatgaagagtggaataatggacacttagatcaagcagttaatattccgcatggtaaattattaaatgaaaatattccttttaataaagaggataaaatatatgtacattgtcagtcaggtgttagaagttcaattgcagtgggtatattggaaagcaaaggttttgaaaatgtggtgaatattagagaaggctatcaagattttccagaatcattaaaataatttaaggatgtggaaaaaatgaataagcattatcaaattgttattattggtggcggtacagcaggtgttaccgtagcatcaagactattaagaaaaaatcaaaacttaaaagagaaaatagcaattatagatccagcagaccatcattactatcaaccattatggacgttggttggtgcaggggtatctagtttgaaaagttctcgtaaagatatggaaagtgttatacctgaaggtgctaactggataaaacaggctgtttcaagttttcaacctgaaaataatagcgttattttaggagataatacagtcgtttattatgattttttagtagtagctccaggattacagattaattggtcttcaattaaaggactaaaagaaaatataggtaaaaatggtgtttgctctaactattcacctgactatgttaacgaaacttggaaccaaatttctaattttaaacaaggaaatgccatttttacgcatccaaacactcctataaagtgtggaggtgcgcctatgaaaattatgtatttagctgaagattattttaggaaacataaaatccgttctaacgctaatgtgatatatgcaacgccaaaagatgctttatttgacgtaggaaaatataataaagaattagaaaggattgttgaagaaagaaatataacagtcaattataattataaccttgttgaaatcgacggtgacaaaaaagtggctacattcgaacatatcaaagcatacgatagaaaaacaataagttatgatatgttacatgtaacaccacctatgggtcccttagatgtagtaaaagaaagtacactttcagatagtgagggttgggtagatgttaacccaaccacattacagcataaaagctactctaatgtatttgcacttggtgatgcttcaaatgtacctacttcaaaaacaggcgcagctattcgtaagcaagcacctatcgtcgctaataatttattgcaagtgatgaataatcaaatgttaacgcatcattatgatggttatacttcatgccctattgttactggatataataggttaatacttgcagagtttgattataataaaaatactaaagaaacaatgccgtttaatcaggccaaagaacgtagaagtatgtatatatttaagaaagatttattacctaaaatgtattggtacggcatgctaaaaggattaatataataaagtacagaaaacaataaatttttaatgaaaaatcttttactataaaagattaagtatttaaatgacgtgtcagtgttgtgtttatatgtcgtgaatttttagctctaaatagtataagattgaaaaagttgttactgttttaaatgatcacgatgaagtcattcaataagaatgattatgaaaatagaaacagcagtaagatattttctaattgaaaatcatctcactgctgttttttaaaggtttatacctcatcctctaaattatttaaaaataattaatggtatttgagcacgtttagcgactttatgactgacattaccaatttccatttcttgccagatattcaaaccacgtgtactcaaaatgatagcttggtatgtacctccaatagtaatttcaataactttgtctgttgaacactaagagcaattttaatttcataatgtgttgtaaacattttttttgattggagtttttttctgagttaaacgatatcctgatgtatttttaattttgcaccatttccaaaaggataagtgacataagtaaaaaggcatcatcgggagttatcctatcaggaaaaccaagataatacctaagtagaaagtgttcaatccgtgttaaattgggaaatatcatccataaactttattactcatactataattcaattttaacgtcttcgtccatttgggcttcaaattcatctagaagtgctcttgcttctgcaattgattgtgtgttcatcaattgatggcgaagttcgctagcgcctcttatgccacgcacatagattttaaagaatctacgcaagctcttgaattgtcgtatttcatctttctcatatttgttaaacaatgatagatgcaatctcaacagatctaatagttctttgcttgtgtgttcacgtggttctttttcaaaagcgaatggattgtggaaaatgcctctaccaatcatgacgccatcaatgccatatttttctgccagttcaagtcctgtttttctatcgggaatatcaccgttaattgttaacaatgtatttggtgcaatttcgtcacgtaaatttttaatagcttcgattaattcccaatgtgcatctactttactcatttctttacgtgtacgaagatgaatagataaattggcaatgtcttgttcgaagacgtgcttcaaccaatctttccattcatcgatttcatagtagccaaggcgtgttttaacacttaccggaagcccacctgctttagtcgcttgaataatttcggcagcaacgtcaggtcttaagattaagccggaacccttaccctttttagcaacatttgctacaggacatcccatatttaagtctatgcctttaaagcccattttagctaattgaatactcgtttcacggaactgttctggcttatctccccatatatgagcgaccatcggctgttcatcttcactaaaagttaagcgtccgcgcacactatgtatgccttcagggtggcaaaagctttcagtatttgtaaattcagtgaaaaacacatccggtctagctgcttcacttacaacgtgtcgaaagacgatatctgtaacgtcttccattggcgccaaaataaaaaatggacgtggtaattcactccaaaaattttctttcataatatatttataccctctttataattagtatctcgattttttatgcatgatgatattaccacaaaagcctaacttatacaaaaggaatttcaatagatgcaaccatttgaaagggaagtctaagagtagtctaaaataaatgttgtggtaagttgatcaatacaaagatcaaggattatagtattaaattgttcattattaatgatacactacttatgaatatgattcagaattttctttggctacttttacagtaaagcgattttttagttatcttataacaaagacaaatttataaaggtgatattatggaaggtttaaagcattctttaaaaagtttaggttggtgggatttattttttgcgatacctatttttctgctattcgcataccttccaaactataattttataactatatttcttaacattgttatcattattttcttttccataggtttgattttaactacgcatataattatagataaaattaagagcaacacgaaatgaatcattaatacgaatgtgattaaacataaaactgaaggagcgattacaatggcgactaagaaagatgtacatgatttatttttaaatcatgtgaattcaaacgcggttaagacaagaaagatgatgggagaatatattatttattatgatggcgtggttataggtggtttgtatgataatagattattggtcaaggcgactaaaagtgcccagcagaaattgcaagataatacattagtttcgccatatccaggttctaaagaaatgatattaattctagactttaccgaagcaacaaatctcactgatttatttaagaccataaaaaatgatttgaaaaagtgaagtagtgaagtgtgggtgcagagagaactaagcccatcgataaatggtcgcttgttaaagaagagtgacggtcactcttctttatgtgcatattttattttgtctgttttgttaacaagcagcagtgtaacaaatatgagtaaggataaaatgagtataatatagaaaccgaatttatcattaatttcattaatccatcttcctaaaaatggagcaatgaaactttgcagtaacaatgaaattgacgtccatatcgtaaatgagcgaccgacatatttatctgaaacagtgttcattatagctgtattcatataaattctgattgatgaaattgagtagcctagtataaatgatcctatgaataagtaaaatgctgagtttatccaaataaatagtgctgaatttatgactaatatgaaatataacaaaaatatcaatactttagttgagattttcttcgaaagaatagctgaaattaaacctgcacataatcctccaatgccatataacatatctgaaaaaccaaattgtacagacgaaagttttaaaacattataaacatatcctggtaatgatatgttaaagatcattgtaaacaccattggtatgattgaaataactccaaaaataaatatcatcatgttgtcttttaaaaatttccatcctaataaatattcttgcaataagctatttgttgattcttcctctgaatgagttggtttatctacatgcaatctaaataacataaaaatgctgattagaaacatcattatagtcatcgctataattagagtgaatccatttattttatataatattcctgataatccacctgcaataaacatacctgtttgcaaactaatctctaatagagaatttgcatctgtatattgatctggttttaatatctgtttaactaaacttctagatgttgccatatacgtagtccaacctatcccattaacaatcgcaaatccaatcactaaataggtctcaaatcctatcattacgagtgctatgacaatgagtaaatataatattacctgaagaagataggtgattaaaataatatttcgtctattatatttatcggctagtccacctattataggagaagctaagaaaccggataatacatttaaagctaacataatacctaatagttgggagtcgttagttttgtcgattaaataccaattagccccaactgtactaattccaactccgaatgctgaaattatttctgctaaaaagaacaatctgaagtttttaattttcaacaaatcagtcataaatatcaccttttttcaatgcaagatttatatttgcgagctcttctataaattgagagtcgtttaaaatatcgaatggtttattgccttcgccgatcaaaaatctatagttagtaatattcataaactcaaatattaatttgaattggttgactaaaggttgtgctttggtatgcggattgtcgccacctatgattaaaatcaaatactttttttgtgacatgatttctttgaagttgtctatttgcgtatctcgcaatgactcggtccatctatcaatgaagagttttaaagacgcactcatggagtaccaatagagtggtgttgaaaaaataataatatctgattctaaaactttgattaaaatttgttcgtaatcatcattatgaaagttggcacctttgctatgacgattatctgtaaccttttcaatgttgctttgatataaattcacaaagttgacttttaaattcttcaatagattctctactgcgatagctgaattgccatcttttctactacttccaaataaacaagtaatcatagtcataactcctttcgatttacctttataataatatttaatatattattattaaatcagaattcttagaattcaggattcgataaaagggaaccctaaaggaggtactactttgaacttaaacattttaaaatcatttttagtaactagtgaaacaaagaaccttactaaagcatcagagttacttaactattcacagtcaactgtatctacacatattgaaaaattagaaaggcaattagatgttaaattattttatagaaaaaaatatggtatggaactaacggaagaaggcttagcatacgttaaatacgctaaagtgattttagatagtaatagcgaatacgagagagaaataaaaggactttacaataagaaggtaaatataagtattaacatgcaagaaagtcagtatttgtatcgctactataataagattagtgaatggttagctgaacacccatatgtaaacttgaagtttaaatccgcacattctaatttctatattaaagaagaaattgctaatttcaaatcggatattagccttatcacagacgaaaagattattaatagtaacttaactgctattcctataactgaagaacgtttaatatttgttactaacaaagagatgaaagatttcaaattaaacgatattcaaaaccatacattacttgttactgaaaaagggtgtagttacagagaacagttagaaatgattttatataaatatagcttttcaacaaaacaaatgattgaatttctaggaattgagtcattaaaaaaacacttgaaaaattcaggtgggattgcgctattgccggaatttattgttgcagatgaattagaaaataaaagtttgtttcaaatagacgtagatgtcgatattccgaatttagaaacaacattgataattaatcctgaatcgaataagcaagtacttgaatcttttgtaaaagatgtttttttataattattggtgaaaacgtgtagttatggtgaaactcaaagataataatttaaatgagatgttaatgaaaaagtaattcaatataaaaacaggtgatttatatctttaataaggattatttctagttgaaatttcaaattgcgggcattcattttcaaaatagtaaagaatttaatagatgaaaacctttgaatcatactagttagtatggattgattaatattttaacctgctaaatgagtagcttatgtattttaaatagctgtcatctagcaggttctttattattaataagttcagataaattattttagtctgttttctaatgttgataataataactttaaatctgtactttcattgtgagatatatagtacatcataaatttttatatttggattgagactctttggaagattttcaataaatgaatatttcacaaacttccacttatcaggattataaattataatttctgcaactgcattatcgaagattctaaacaattttttgatttctatttcttttagagataaagtagggaaaatgtcgatatattcttcaagcgcataaagactatgtttaacagaatcggttatgttcattgaatatatcacaccaatatttatattttgccatccaaaagaagaaataacattatcataaaatccattgaatataaattcagtcatcccctctgaacttctccataaatataatggtgaataagtatttgtaatgcaattagtagttgtttgacttattaaataagcttttataattaaatttttaaatccatcagtcttataaccatttaatcgaactctatctctaattatttccatattgtaatcactaggcaacttaacatgatattgcattgcatgcatttagcatacccccttttataaaaaggatagcaataataagtaaaatctcatattatccaattgtgatatagttatcataaaaagtgataggtgattaaattgaactttaatgatttggaaatttttataactgtatgtgaagaagcatctatcaataaagctgcaattaaacttagatatgcacaatctaatatatctcaaagaattagcaagcttgaaaatgaattaggtgtagttttgctttttagaaatcaaaaaggtgctaaggcaactaaagcaggcgaagaattcttagcgtatagcaaaaaagtattaagagatacagagactataaaaaataaaatgaaaaataatactatgtctattttatgctcagaactgttatttaattatttatctgagagcgaagaaattatgatgtcgaataactcaattaattttatttctagtggaaatattagaaaagctatagaaaaaaataattatgataaggttatttcattcataaaaattaacgactcaaattatagacttagtaatgttgatactatgaaagtaacgctttacagtaatggaagtaattatgataaagaggctttactaataaataaagatgagttttgtcctttaaggaaaataactttagataataagcttgattcacaacgggtaatggaaattgattcattggcagcaataataaacttagttaaacaaggaaaaggaaaggctttattacctatgacttttgagaataaaagagatatagtacaggacatttctaagatatttgaagttaactactatacttataatcatattatgcatcattaattgaaagttgattgagtttaaattacaggaacgattttaaaagtctagtagttagaatgagcgatgtgacagaaaagaaattatgccttttattttgtaaattcgttgttttaaagtaaaggtccttgtagtataggaaaaagtggatgacttctccgcctttaccaccctttcaagcataatgataactgctaaatattgattatagcaccattgcaaaactaatcattaattgtcatattcaactattttgaaaagtatcaatttcacattatcaaattattgagtatctcaatttattgttatacacaaacagtatttttgttatcatagagttaataaatataataaattaaacaagtaactttacaaaaattagaatgattcaattcaatcataattgtttgaaaatagaggtgagcaggtgaacgatatgttaattagtcttgtaatcccagtttttgctttgttagttattggtggtattatttggatgattatagaaggtatagtacatatttcaaaaaagaataaagcaattgataacttttttaaccaagttaataaagtaagtgagacatataaattcgctactacttttttatttctaatcttggctacggcgggtatttctcaattttatctatattatatagtatcagcgttacttttttggcttgtcatacttacctttggtattgcaggtatcatttttttaatgccatatggattatgttttctaccgttttataagcaaaaaaagaaaaaacagacatttaaaaaatacatggtttacactacgattggtttgtcaatttgtctaggcttatctctagttttggttcacactacgaaaatttatatggacgaaggtggcgtaagatactattacggtagttttgtaatgaaacaagcgggcggttatgcttatttagctttagcagtactttcaacgttgttaattgttgcgaaaaaagctacaaataaaaataaagaaatcgaaaccgtcgacaatacaaatataatggaaagataattaagggagtgctcattcaggagtgctcttttttgatgttcaaatttagttggaaatgaaggcatagaagaaatttttatagtcatttattggataatgaattatggtcatatcgattaattttattagtgaggattttacaaacatttgttgaataaatatggtaatgataatatatgaatatttttgaaaaaacactaatatgattaaattatttgttaaaatggcattaagtaaaaaacaaacagggaacaaggtgggatttcatgagtcaattgctaaatgatacgttatcggcttggttgttaattgaatctttaagtccaggagaagtaaattttacagcggaagatatactctcagctgaacattttaaaaatggtgcaaagcaagcacaacttcaaagttttgatgaatattttgaaatatggaatgctgaacgctttattatatcagaagaaaaatcagagactggggaacttatatttaaattttatagacattgcttccgctataatgaaattaatttgaaaattcaggatatttttgatgattattctgagattcataatccaaatgggacacactgttatggttacacatttaacacagataaacacggcaaagtgatagttgattctatacatattccgatgattatgagtgcattaaaagaaattgaaaagaacaaaaatgccaatatagaagaaaaatttaatgattctgttgaaaaatttgttcaaaaagtaaaagaaattttagcagatgaaccaattaatgaatttaaattgaagaagatggacaaagcttatgatgagtacttttctgtattaaattcaaagaaagatggattatttggacattatgtagcaatagaatatgtgaaagatagtgatttaccacagccggaatttaacagcttcttcataagtgatattgagaaagcaagaaaatctcccaaccaaactttaattgattacattgaaggtgtagaagaaagtcagcgcatagaagtagatgaaaataaagaaatgtttgacaaatttttacatccttcacgtttgcctgatggacgatggccatcacagactgagtttagattgtctttaatgcaacaacttgctgtaaaccaaattacgagtggtaatgaaagaataagttcagttaatgggccaccaggtacaggtaagactactttattaaaagatatatttgctcatctagtagttgaaagaggtaaagagttagctaaactaaataatcctaaagatgcatttgtcaaaacaaaaattcatgaaacggatgataaatacgtatacttactaaaggaatctattgccaaatataagatggtagtcgcatctagtaataatggagctgttgaaaatatatctaaagatttaccgaaaattgaagaaattataagaaatcccgaaaaatgtaaattccctaaatatgaacagaattatgcaaatttagcacatgaattaaaagattttgctgaaatagctgaagatttgattggtgaaagtgcctggggcttattttctggagtttttggtaaaagtactaatattaaccaagtattgagtcatatgttaaaacaagatgcgaatgatattggctttgctaaattactacaaaatgagaataatcgtatgagttataacgagttaatgagtgaatggcaatcacatcaacgtgcatttttagaagagttgaggcatgttgaaatgttaaaagaagaatctattagagcatatgatgtttataaaaattgtgagtctttctctaagattgaacaggttattaatagtgaaaaaacaagtattgaagaacaggtatatcatttagataatgaaacgttacgagacaataaagaaatagaagatttggataatcgaattaattatattgttaagcaaatagaaactttaaatgagttaattaaatccatcaaagaaagcaacaaaggttttattaacaaactgaaagcgatgtttaattcagaagaagatgaaagctataaagatcataataaagagaagcaacaattattaacacaacagttagagttagagaaatgtaaaaaaaacaaacatgaagaccttgttagcaaactaaaagaaaaagagaaattaattaaacaattaactaaagtacagttgcaattagacgagttaaattcacagttacaagagttagaagcatatcgtattgagtcaaaaattacaattccagaaaaagatttttggagtgacaacaattatgatgagcgccaagttactaatctgtggacgagtgacgaacttcaatacagacgtgccatgctctttttaagagcaatgatattgcataaattattattgattgctaataatacaactatttattatgcgattaatgattttaaagatagaaggaaattaattgatgcaaatccagataaagtacacaacgcatggaatgtgatgcatttaatatttccagtagttagtacgacgtttgcaagctttaaatctatgtatgggggcataccaaaagatttcatagactacttatttattgatgaagcaggacaagcaatacctcaagcagctgtgggagcattatatcgttcaaaaaaagttgtagctgtaggtgatccgattcaaatagaaccggttgtgactttagaaagtcatttaattgataacattcgtaaaaattatcatgttccggaatatctagtttctaaagaagcttctgtgcagtctgttgcagacaacgccaatcaatatggtttttggaaatctgatgctactgatagtaatcaaaaaacctggataggcatacctttatgggtgcacagacgatgtttaaaacctatgttcacgatagctaaccaaatcgcttataataataaaatggtgttgccaagtaatattacaaaagtaggtaaaacaggttggtatgacgttaaaggaaacgcagttcaaaaacaatttgtgaaagagcatggtgaaaaagtagtgggattattagctgatgattggattgaagcaattaaggaaggtaaaaatgaaccgagctcatttgtaatatcgcctttttcagcagtacagcaacagattaaacgtatgttaaagcaacaactaccgactagaattgatattgaacgtacaaaaattaatcaatgggtcgataaatccattggtactgttcatacttttcaaggtaaagaggctcagaaggtgtattttgtaataggtactgataatacccaagatggtgctgtgaactggtcatgcgaaaaaccaaacttgttaaacgttgcagtgacaagagctaagaaagagttttatgtaattggcgacatgcaaagaatacagatgaaaccattttatgagacgatttttaaagaaagaaatgtaaaataacatacaaaaaagtatatagaggaagttatacattttaaaaggagcaaaattgaataatggagaaatttaacaactggatattaaatgcaataagtggatctcaaacagacaagaatgaaacaactgaagaattaaaaggggcaaaatttatcattttatatgcatattcaatgctcgttttgcttgcgttagtaatttctaacatattcattcacattttggagcctaaactatcaatcaccactcaaatcatcatcgttttgattttaattgaagcactaattggactgcgtttcttgaaagcgtacgatgttaagcgtggcaaagataaagaaaataagaaaaatagtaaggatttcgttaaactaaaatcaattttagtagcaattttatttacatcattggcgctgacagcaggtactgtagctgatatatacggtttcactgacttaggaaatactagaagtgatttaatcgtttggagcataggtggtattatatttggcctcgtatgttacacaatggaagataaaagataacgataaggagctggcgattataaagctagctccttttttaacttatatatgtaaagaactatcctaagggtttttaatcatatgtcaataatttctataatacattattaaaacatcaattaaataagttttaaaattttacacatatttttatttaaaaaagatgtataattaatgtattaaatatagaaagaagttgatattatgaaaaagtgtattaagactttgtttttaagtatcattttagtagtgatgagtggttggtatcattcagcacatgcgtcagattcgttgagtaaaagtccagaaaattggatgagtaaacttgatgatggaaaacatttaactgagattaatataccgggttcacatgatagtggctcattcactttaaaggatccagtaaaatcagtttgggcaaagactcaagataaagattaccttacccaaatgaagtcgggagtcaggttttttgatattagaggtagagcaagtgctgataatatgatttcagttcatcacggcatggtttatttgcatcatgaattaggaaaatttctcgatgatgctaaatattacttgagtgcttatccaaagaaacaattgtgatgtctatgaaaaaggactacgatagcgattctaaagttacgaagacatttgaagaaatttttagagaatattattataataacccgcaatatcagaatcttttttacacaggaagtaatgcgaatcctactttaaaagaaacgaaaggtaaaattgtcctattcaatagaatggggggtacgtacataaaaagtggttatggtgctgacacgtcaggtattcaatgggcagacaatgcgacatttgaaacgaaaattaataatggtagcttaaatttaaaagtacaagatgagtataaagattactatgataaaaaagttgaagctgttaaaaatttattggctaaagctaaaacggatagtaacaaagacaatgtatatttgaatttcttgagtgtagcgtctggaggcagcgcatttaatagtacttataactatgcatcacatataaatcctgaaattgcaaaaacgattaaagcaaatgggaaagctagaacgggttggctgattgttgactatgcaggatatacgtggcctggatatgatgatatcgtaagtgaaattatagatagtaataaataaggattcaataatgatattaagacgagtatgaaaatagttagattctaattattttcactactcgtttttattttgaaaataagtaataattcaacaatattataaattgaacagattgtttgtgaaatttttgataatattaaagtgaaaaagtgttataaattgataaatatatgtaattaacaaaaacaaatcattttaaaaagaagagagttgtaagatgatgaaacgattaaacaaattagtgttaggcattatttttctgtttttagtcattagtatcactgctggttgtggcataggtaaagaagcggaagttaagaaaagctttgaaaaaacattgagtatgtaccctattaaaaatctagaggatttatacgataaggaaggctatcgtgatgatcagtttgataaaaatgataaaggtacatggattataaattctgaaatggttattcaacctaataatgaagatatggtagctaaaggcatggttctatatatgaatagaaataccaaaacaacaaatggttactactatgtcgatgtgactaaggacgaggatgaaggaaaaccgcacgacaatgaaaaaagatatccggttaaaatggtcgataataaaatcattccaacaaaagaaattaaagatgaaaaaataaaaaaagaaatcgaaaactttaagttctttgttcaatatggcgactttaaaaatttgaaaaattataaagacggagatatttcatataatccagaggtgccgagttattcggctaaatatcaattaactaatgatgattataatgtaaaacaattacgcaaaagatatgatataccgacgagtaaagctccaaagttattgttaaaaggttcagggaatttaaaaggctcatcagttggatataaagatattgaatttacgtttgtagagaaaaaagaagaaaatatatactttagtgatagcttagattataaaaaaagcggagatgtataatcatggctcaatcagaatatgaaatcaatcccggaaaaagagagtgatgaaatgataaaacgtgtaaataaattagtgcttggtattagtcttctgtttttagtcattagtatcactgctggttgtggcatgggtaaagaagcggaaataaagaaaagttttgaaaaaacattgagtatgtatccgattaaaaatctagaggatttatacgataaagaaggatatcgtgatgatcaatttgataaaaatgataagggaacatggattgtaaattctcaaatggcaattcaaaataaaggagaagctctaaaaataaaaggcatgcttttgaagatagatagaaatacaagaagtgcaaaaggattttactatactaatgaaataaagacggagaaatacgaagtagctcaggataatcaaaaaaaatatccagttaaaatgattaataataaattcatttctactgaggaagttaaagaagaaaacataaaaaaagaaatcgaaaactttaagttttttgcgcaatatagcaattttaaagatttaatgaattataaagatggagatatatcatataatccagaggtgccgagttattcagctcaatatcaattaactaatgatgattataatgtaaaacaattacgtaaaagatatgacataccaacaaataaagcgccgaagctgttgttgaaaggtacagggaatttaaaaggttcatcagttggatataaaaaaattgaatttacttttttagagaataaaaatgaaaatatttactttactgatagtctacatcttaaaccgagcgaggataaataaacgtgaccaataaagagtatgaaatcgaacccggaaaaataacaagtaattttgtagaaactagcgcaacatcaaatatatgagaatagtcaaattataagtaattaacaacgtatgttatttcaaaataggtattaacctaaataaataacaatattttaaatttaatagattgcttgtataatttttgataatattaaagtgaaatgtgttataaaacgttgaaaatatgtaattcacaaaagcaaatcatataaaaagaagagagttgtgatacggtgaagcgtttaaaaaaaatagttttatgtattagttttctatttttaacaatttttattgggggttgtggcatgggtaaagaagcggaaattaaaaaaagttttgaaaaaacgttgagtatgtatccgattaaaaatctagaagatttatacgataaagaaggatatcgtgatgatcaatttgataaaaaagataaaggcacatggattattaattctgaaatggcgactcaaaataagggagaagctttgaaaattaaaggtatggtcttatacatgaatagaaatacaaaaacaacaaaaggatattattatgtaaatgcaataaagaatgataaagacggaagaccccaagagaatgaaaaaaggtacccagttaaaatgattgataataaagttattccaacaaaagaaattaaagatgaaaacataaaaacagaaatcaaaaactttaagttctttgttcaatatggcaactttaaagatttgaaaaattataaagacggagatatttcatataatccagaagccccgatttattcagcgaaatatcaactaactaatgatgattataatgtaaaacaattacgtgaaagatatgatataccgacgaataaagcgccaaagttattgttaaaagggtcagggaacttaaaaggttcatcagttggatataaaaatatagaatttacttttgtagaggaaaaaggtaaaaatatatactttagtgatagcttagattataaaaaaagtggagaagtataattatggctaaagcagaatatgaaattgatcctggaaaaataacaagtaattcggaagaaactagcgcaatatctaatattagttatgaaatagaaaatgcaaatgataataatttagataatgaaaaaattagagggcaaattactaaattaaaaaagggtgggaattttcctaaaaacttagactacatagatagttatacagaccccagtacggggaccacggcaacggcatttttaaataaagatacaggtaaagttactgttggaatggctggtacaaactttcacggcgatcaacttaaaagagtagcacttagttcgatgtctccgttattattcccaccctctaagcaagatatgaaagatgtacgaggcactatgaaggatggtgtagcggatttagccattggagtaggaatggtcaattataaaggaaaacattttgcaaatacacagcagtttattgagaatttacaaaaaaagtacgaaattgataccgttactggtcattctttaggagggagagatgctatctttcttgggcttcgttataacatcaaaaatgttgtggcatacaatcctgctccgttagaagtaaaaagcattcgtaataaatttggtggtcaattgtttagaaatacgacatttccagatgaaaaatatttaaaagagttaatggataattatgatggagatattactaaggttataactcaaaaggatggattagactatttagtgaagcgtacagatcatttaacttgtggtgatgtgttacgtataaacaatggtcagggccatgcgatggagaattttttaggagaaaaagaacaacgtgaaataatcgaagaactaatgttagtaaaaggatatcgcgatgcaaatgacaaagcatttaaggctttgaaaaaaaatactgagaaaaaactcggtaaaatagatgaaatcaaatcgaagttactgcaaacgaacggtggcgccctctcgtcttctcaacaaaaattgcttgaaactttagtggcattttcggtagctgaaggactaagtaaaatggttgaccaagaacttcagcagttgaaaaatatgttcaatcttatggatgagaaatttgaagcaaattggaaagacgcacaagaagctagtgatattgtaggtaaacatctttcatacccagaaaaggtaagtgcattagataacggtggtgtcaatgaaagtaaacttgctaccgaaccacataatgaaataaaagacaaactaaataaaattacggacttatctaagaaatataattcgtatttacagcaaatcgaaaaaagtattaatgaaatagttgctaaggatcaacaattggcagggcaaataggtgatttaatatgatgtttgaagaatacaagaaaatagatgatcttgaaaatgcatatgaaatagagttgaaacgtattgaaagggagatacaaaatcttagtgatttaaaatatcaccttagaagagaaaatgaacaaagttatgatgcatttttgtatttaaagaataaaatgaactatagtgaagagtcaaatgctaaggtgagacgactagttgaagaatttgattatgaagcagatacttatattagacaaaaagagttaaagttagaagattataaagaagaaataagaagagaatatatacagcaatctgaaaaaataatggaggcgaagtagcttatgggaatccctgatccgttatctaatcctatgtctgaccctttactaggagatagttggatggtaggtgatttgaaaaaaagacaggaaaaaaaactaatcacaacagtcatcgcacctgaacatgatgaaaagcatcgtgaaaataaaagtaaaatgaaaaaatctgaaaagcaattgatcaatcagttaattaatcatggccatacatttaagagtgattttaaaaatgtagctaaaggtgattgggttaataaagccatgcaagacttagataaattaggcaatgagcttaaaaaaataatgaattagttgaattgtcacatactttttcaaaccaacaacgaactaaaaaatccatataaatatgattaaaagaagtcataaccattcgtaaaggatggttatttttaatagtaaacaaaattgctgctaacctacatcttgaaccaagtgaggataaataacctcctgcctcccacacgattcaacacgaatttcaaatatattgctgtaaaataatgtaaaataaacgtattcatattactgaattgagggatagtatgcaacgtgattatttaattcgagtagaaactgaaagcatgccagatttcaaaaggctcaatggtttaatgattggttttgttattaaaggtgaggcacatatttatgatgaaaataacatgacgcaatgcaacagtggcgacattttcatcattaaccaccgtgacttgtatcgatttcaacttcaacaagatggcatcatatgttatatccaattccaaatgaaatatttggcagacaagtttgatgatgcgcattgtctatattttcacttaacagatgcgaccacaaccaagaatatacatcaactgagaaatataatggcaagactggtttcaacacacattcgacataatgagttgtctaaattgactgagcaacaacttgtgattcagttgcttatgcatatgattcattatgtcccgcgtacatatcattcgaaccaaagtatcttaaatgatgataaagtgaatcaagtatgcgactatatcgagttacattttcatgaagatttaagcctttcagaattaagcgaatacgttgggtggtcagagagccatctgtctaaaaagtttacagaatcgctaggtgtaggattccaacatttcttaaatacgacgcgaattgagcatgcgaaactcgatttaacatacacagatgaaacgattactgatattgcattgcaaaatggcttttcaagtgcagcgagctttgcgagaacatttaaacactttacgcatcaaacgcctaaacaatatcgaggtgatcgtccagcaatcactgaaaatcaacaatcggcacaacataattatcacgaccgtgaattgatattacttttaaatgactacattgaagaaatgaatcatttcattgaagatattgaaaagatgaactataaagagattgcctttaaaccaactaatcaacaactaaatcaatttaatcatattattcaagtgggctatttgaggaatttgctcaatacacagtatcaatcacagttgcttacatgtcatcatgattttcaagtcaatgaagtattagcatatgatgtgatgccatatattatgaaaaagctcaatgcgccattcacgtatgatgcagagatttcgaatatattttatgatatcgatttgtgtttagactttttattagatcataattttagtctaaccatgcatttgaatcagtatgactcacgagattatatcgatgcattcaaagtatttatccatcacgttgccctgcatgtcagtcatagaaaagatttgaagttcaacttgtatgtgacgacattgcacaatgctttgattgaaatgattgattattttaaagcgttattccctaatggtggcttgtacattcacttagatcaagctacggaaagacatctaccattgttgaaacgacttgagccacacatcgaccattttgtatttgatgccaattcaaatgatgctgttgattttaataaaatgaatgatgatgaatttaaaaccgcgagtcaaatgattattaataaaacgaattactttatcgacttaatacatcgtcataacctaaagcgtccactcattttactcaattggaatacattgacgggtgatacatttataaccaacggcgaatattttagaggtggtatcatcattgagcagttattaaagttaagctctaaagtagagggtatcgggtattggttgaattatgatttgcacgttagtcattgtaaaaatgaacgggattatatgaattctattgaactgtttcatcaatataatggaaaacgtccggtctatttcacggcattgctatttaataaattaacaagcaatattttgtattctgatgatacatgtattgtcacgggaactgattcaaattttcaaatattgttatatgatgcaaagcattttaatccgtacttagcgttggacaatcaaatgaatatgcgtgcaacggaaatgatccatttgaacattaatgccttggaagaaggtatgtataagattaaacattttaccttagataaagaaaatggtgcgttatttaatctttggcgcaaacatcatacgatacatggcatggacaaggactctatagattacgttaatcgaatgagttttccgaaattagaagtatatgatatagatatcacggacacactggcattaaacattaaaatgattacgaatgggattcacttaattgaagtaaaacgttacccaagttcataaaatgatcacaaatcacaaattttgatatacataatttgtgattttttatattcaaagctaaaattgcaaaaaattaatggttaacatctctgttgttggcaatataaataatgattaatcatttatgatgtaactaaggagatgaaggatatgaatcaacaattaattgaaactttaaaatctaaagaaggcaaaatgattgagatcagacgttatttacatcagcatccagaattatcttttcatgaagatgaaacggcgaaatacatcgctgaattttacaaaggtaaagatgtggaagtagaaacgaatatcggaccacgtggaattaaagtaacgattgattcagggaaacctggtaaaacattagcaatccgtgcagactttgatgcattacctattactgaagatacaggattatcttttgcatcacaaaataaaggtgttatgcacgcatgtggtcacgatgcacatacagcatacatgcttgtattagcagagacgcttgctgaaatgaaagatagttttacaggaaaagtcgttgtgatacatcaaccagctgaagaagtaccaccaggtggtgctaaagcaatgattgaaaatggtgtattagacggtgttgatcatgtattaggtgtacacgtcatgagcacaatgaaaacaggtaatgtgtattacagacctggttatgttcaaacaggacgcgcatttttcaaattgaaagttcaaggtaaaggtggtcatggttcatcaccccatatggccaatgatgccattgttgcaggtagctacttcgtcacagcgttacaaacagttgtatctagacgactaagtccatttgaaaccggtgttgtcacaatcggttcatttgacggtaaaggtcaattcaatgtcattaaagatgttgttgaaattgaaggtgatgtacgtggattaacagatgctacaaaagcaacaattgaaacagaaattaaacgtttatcaaaaggattagaagcattgtatggtgtaacttgcacattagaatataacgatgattatcctgcattatataatgatccagagtttactgagtacgtggctaagacgttaaaagaagcaaaccttgattttggtgtcgaaatatgtgaaccacaaccaccttcagaagactttgcatactatgctaaagaacgtccaagtgcctttatttatacaggtgcagctgtggaagatggtgaaatttacccacatcatcatcctaaatttaacatttcagaaaaatcattacttatttcggcagaagctgtagggacagttgttttagattaccttaaaggagataactaacatgaatgaaacgtatcgcgggggcaacaagttaatcttaggtattgtattaggtgttattacattttggttgtttgcacaatcacttgtaaatgttgtaccaaatttacaacaaagttttggtgcagacatgggaacaattagtattgcggtaagtctaaccgcactattttcaggcatgtttgttgttggagcaggcggcctagcagataaaattgggcgcgtgaaaatgacgaatatcggtttattgttaagtattattggttcagcattaattattattacgaatttaccggcattattaattttaggtcgtattatacaaggcgtatcagcagcgtgtattatgccttccacattggccattatgaaaacttattatgagggtgctgaacgtcagcgcgccttaagctactggtctatcggttcttggggtggaagtggtatctgttcactcttcggtggggcagttgcgacaactatgggttggagatggattttcatcttctcaattatcgttgccgtactttcaatgttactcatcaaagggacgcctgaaacgaaatcagaagttaccaatacacataaatttgacgttgcagggctaattgttctagtagttatgttgctaagtttaaacgttgtcattactaaaggtgcagcacttggttacacatcattatggttctttggtttaattgcaatcgtaattgtagcattctttattttcttaaaagttgagaaaaaagtagataatccgcttattgattttaaattatttgaaaataaaccatatacaggtgcaacgatttcgaacttcttattaaacggtgttgcaggtacattaattgtagcgaatacattcgtgcaacaaggtttaggttatacagcattgcaggcaggatacttatcaattacttatttaatcatggtgttattgatgattcgagttggtgaaaaattattacaaaaaatgggttctaagcgaccaatgttattaggtacattcattgtggtcattggtattgcacttatttcattagtattcttaccaggcatattttatgttattagttgtgtcgtaggatatttatgtttcggactaggcttaggtatttatgcaacaccttctacagatacagctatttcgaatgcaccgttagataaagttggcgttgcttcaggtatttataaaatggcttcatcacttggtggtgcattcggtgtcgcaattagtggtgcagtatatgccggtgcagttgctgcaactagcattcatacaggtgcgatgattgcactttgggttaacgtattaatgggaatcatggcatttatcgcaattttattcgcgattcctaatgatgataaacgtgtcaaagatgcgaaataataacgatgacacgccaagtgttttgataatgatataaatgaaagtaaagcaaattaaatgaggaaatgtatagagcagtgcatatagataaatctatgattggattaacactaatataaatataaatgaaaaaccatccacttaaacttttgataagttaggtggatggttatttattgtgttgttctaaaaatttggacatttatatagaaggaactatatctaatgtgaagataatggctattcgcttcaatgaaggcgacgtgtaaaagtgtatattaaacgtttcggggtcagactccgagaacagtgtccgtcatgcttaccgcatactaatgaagcattattatatcagtgtttatagccgatttaagataataaattttgctaaacaaaaaagccaacccatgaatgttggattggctttttacatgcatctgaatctctaattttaaaaaaatatgaatataaataagacagtaaaaattaaatttcagttgttgcaatttcttcatctgtaggtacatcatcgttaaggccaacaagtgcttcagaaacatttcgtgaatgataaccgatacgttcaagaacaccaatcatatcgatatatagtaatccgccttttgttgtacattcaccacgattaaggcgtttaatatgacctttgcgtagtttatgttcaatattaaatgattctctactacgttctacaatttcatcttttttcgttttgtcataaacatctaacatgtcgatggctttatcaaatgactcagcaacatggttgaataatttatccataccgcgttgtgcatcttctgtaatgcgaatatcttcatcatgttggcgttttaattgagcgacatactcttctgttagctctgctacttttaaaatagagcgattgacatcaaacataactgctaaacgctcaacgtcagccttcgttatggcttttgtagaaattctaactaaataatttcgaatgctatcattgattgtttcaacagcttggtgcttttgttcaagctttttgatcaattttttatcgtcttttgtaatttcgcgaatgtcttcaaacattgataagacaatctgaccaacattttgtaattctttttgagtttcttgtaatgcaacaccaggtgcgtgataaacaagatctttgtttaagtgctgaggtttatagtcatcagcaatatctttacctgggacaagctttgtaacaatccatgctaaacctgctacaaatggtaattgaatcaaagtatttgttatgttgaagataccatgtgatactgcaatcgtcatcgctggttttaagtgccatacatcttgtaacaaactaatcaaatgaatcacaactggcaagaaaattgtgaagataattaccccgattaagttaaagatgacgtgtacaagcgccgcacgttttgcagcgattgagccggctaaactagctaagatagctgtaatcgttgtaccaatattatcgcctagtaacacagggattgctgcgtttaagctaattaaatcttgttgataaaattcttgtaaaataccaatcgtcgcacttgaactttgaactagtgctgttaaccctgcgccgacaataacagcaagtattggatttgatgacatatcaagcattaattgcttaaatccatctaatgatgctaaaggtttaacggcatcacccataaattctagaccgaagaatagagaaccgaaaccgaatagtatgcggccaatgttattaattttagagcgtttaaagaaaaagattaaaaatgcacctaatgctaaaattggcattgcatattcgcctaaatctataccgataataaatgcagttaccgttgttccgatattagcacccattatcactccaatggcttgtttcaatgtcataaatccagctgttaccagtccgattgtgataactgtcgtacctgaactactttgtattaaaatagttacaacgatacctgcaataacacctaatactggatttgatgtaaatttgtttaaaatatctcgtagcctgtctcctgctgatgcttgaagcccgtctcccatgatttttaagccgtaaaggaaaatacctaaaccacctaaaaaggagaaaatgacttctgtaaccgacatttccattatttcacctcaaataagctttatatttagattatcgcttataattgtaaatttaatgttaagattaggtaaaattatttaacaatatatgttatttgtatatgacttgtaaaatatcgtcacttattatgtaaattttcagtgtgaaatggcaggtttgcaatcacttgtttaacaaaatgatgcaatcaatcatgtaattatgtttcatcaaaaaaatcatgtgagtgggataacgaaataaagtttgtgatcatatcacttctatcccactccatgatttgaaatcaccatatagacagatttaatgtgcctcgttataacaatttgtgttcttttaataatgactcaatgtacgtaccttttatctttttaaggaatcctgctaatgcgagtttttgcattttcgaatctttagtaatctcgcgcaaatcttgatggtcattcagttcgtatatggcatccattaagacgcgaagatcaaatgtactattgatgacctctggaataccacgatctatatttagtaattgataaacagcttccatggcagtacgaaccgaatattctgttgtaaatacagtatctcgctctgtttctgcaaagttaccaataaatgctaaattttgtgattgatgcgggacgactaaaggtctgtcgccgatagcacgcgtcatgaaataagaggtaatatatggcatataaacaggaatcgtattagatgcatgttttgctaagtcttcaattttgtcagttggtacacctaagtgatacagccattcttgacatatttcattaccactacattctgtgattggctttttaatataatcgccgtttacatctgaatataaggcataaatccatgtagatatttcatttttaggttggtctttaaactgttgctgacgattgattgtaaaactgatttgccatgcagaatcattgattgtaataattccgccagtaaccgttttgcctgcaagagggtcacgtttacaaatgctttctattgtatcgataatatctttattgtttgttgtcgatgttgcagaaacaaaccaactcttttgaggaatattttggcaaaacttatcaggattaccaaattcaggactttgtcgcgctaaatttttccatagtgtccaactaccacctaattcgtcagttggtggtgctggtgtatcattatcaccatacgtagagctttccgtaatactaccgtttgtcacaaagacaagatcatctacagtcagtttaattgactctgctttgccatgtcggtgaattaatatttctcgggcaattttttgacttgtcgtaacatctactttaatatcttctacttttacaccgtattcaaattgaaccccatgcgattttaaatattcaaccataggtaatactaaagattcatattgattatatttagtgaattttaaagctgaaaagtctgcgagaccaccaatatgatgaacgaatcgcattagatagcgacgcatttccatagcagaatgccacggttcaaatgcaaacatcgttttccagtaaatccaaaagtttgaattaaagaagtcatcggaaaatacatctgttattttgacatcatctaaatcttcttcattcgttaagcataaatctaaaatttctttaatcgcttttttggtcaaagtgaagtctccatcggtaactaaacgttgaccctgtttttcaataactcgacagcgagaatagttagggtcttctttgtttagccaatagaactcatctaatacagacgcgttatcgatttctaatgaagggatagatctgaataagtcccacaaacattcaaagtggttctccatttcacgaccacctcggacaacatagccttttaaaggcatattttcaccatcaagactaccacctgctttaggtaactcttctaaaatatgaatcttcgaaccttccatttgaccatcccttattaaaaaacaagctgcagcaagtgaagctagaccagatccgattaagtaagcggatttgttttctacattttcaggttttttagggcgcgcaaatgcttcataatttccataactgtaatacatatccaccaagtcctttcgtattagaatacactcagactatacccctttgtgaattgcaaatattagtatttatattggtaaatttgacgaaattagatcatttttatatttttgatttttaaaattttatcactcgaatgtttttggattctgaggtgcgggacttggaataattcgaatcattatgtggcatgttaaacaggtaaatataagctatgcacatttaacaagcggatactcctgacgcaattatagtatcattacatattgtttaatcgtttggggtaatgtaattaaaaggtaaaataggcagagtgttatacataaaatgtaaagaaagaggcgatagaatgtctaaaatcaggtcttttacaatattaagtctacttatttacttagctatgatgtgctatacagtagtgacctattcaaaattaccaaccaaagtacctattcattataatttagcaggggatgctgataactttgctgataaatgggtgctgcttttgattaatagcgcatttatagtgatttggcttatatttttcattgcaggtagatactatgaacgatttgccaaatggtcacattataatcatacaccacgtgaaattcgagcgattaaattatttttaagtacgttaaatttagagattatgagctatatgtctatcttcacagtattagaaatttggcaaatacaacaccatcatcaattcaatttactatggtttaatatgatatttatcattatcattggtttgacgcttgtcatattttgtttacttcctacaattcataaaatgagagattctcaataaaaatataaactgtcatgatgcagttttgaagcggattcctgagattattataaataatatctagtatttataattaaaatgatatattatttattatagttaaatattgtgtatattttgtgaactttttgtaaaaattcgattgcctgtcacatataggagtgttacattttaaatatgtgatcatcgcaaaatataagttgaaataggttgtagattaatcaggatgataaatattttatataaagagagggagtcattatgacactacttactgtaaatccattcgataatgttggattatcagccttagttgcagcagtacctattattttatttttattatgcttaaccgtttttaaaatgaaaggcatttatgcagcattgacaactttggttgttacattgattgtggctttatttgtatttgaattaccagtgcgtgtatcagcaggtgcgattacagaaggcgttgttgccggtattttcccaataggatatatcgttttaatggcagtttggttatataaagtttctattaaaacaggacaattttctattattcaagatagtattgcaagtatttcagaggaccaaagaatccaactattattaattggattttgtttcaacgcatttttagaaggtgcagcaggatttggtgtgccaattgcgatttgtgcagtattattaattcaacttggatttgaaccattaaaagcagcgatgttatgcttaattgctaatggtgcggcgggtgcctttggtgcaattggtttaccagttagtattattgatacgtttaacttaagtggaggcgttacaacattagatgttgcgagatattcagcattaacacttccaattttaaactttattatcccatttgttttagtattcgttatagatggcatgaaaggtattaaagaaattttacctgtcattttaacagtgagtggtacatatactggattacaattattattaacaatattccatggtccagaactagcagacattatcccatcactagcaacaatggtggtgttagcatttgtttgtcgtaaatttaaaccgaaaaacattttcaggttgaaagaatcagaacataaaattcaaaaacgaacgcctaaagaaattgtctttgcttggagtccgttcgtcattttaactgcctttgttttagtatggagtgcaccattcttcaaaaaattattccaacctggaggtgcacttgaaagtttagtaataaaattgccaattccaaatactgtgagtgatttatcgcctaaaggaattgcgttgcgtctcgatttaattggtgcaactgggacagcgattttattaacagtaattattacaattttaattacgaagctaaaatggaaaagtgcaggtgctttattggtcgaagcaattaaagaattatggttaccgatccttacaatttcagctatcctagctattgctaaagttatgacatacggtggtttgactgtagcaattggacaaggtattgctaaagctggagcaattttcccattattctctccagtattaggttggattggtgtgtttatgactggttcagttgtaaataacaatactttattcgcacctattcaagcgacagtagcacaacaaatttcaacaagcggttcattacttgtggcagctaacactgcaggtggtgtagcagcgaaacttatttcaccacaatcaattgccattgcgactgcagctgttaaaaaagttggtgaagaatctgcattattaaaaatgacgctaaaatacagtattatatttgttgcttttatttgtgtttggacgtttatactaacgttaatattctaaatataaataatgttgtcacttggattcaaatgacattttaaatctaattattcatgaatcgaactagtacgaaatgcattgagcatcttgtctagttcgattttttaatgtctaaaaatgtcgtatatgtaattagagtagaaagtgttgaggcgtttcagaagttgtttagaaaagtaagtaaaataaaaaatgcactgagcaacaaaagatgttgctagtgcatttagatgattcttatcatttcaaataagaatgtgttaatcaacgtatataagttaaaattggtttggataaaatgatatctatcgttgtgtattgtttgtttttatagttcgcgacgacgtccagctaataacgctgcacctaacgctaatgataatccaccaaatacagttgtaccaatgaatggattttcttcaccagtttctggtaatgcttgagctttgttagcatctgcatggtttgctggttgcttcttatcaacaacaagttcttgaccaggtttgatcatgtttttatcagctaatttgttatctgcagcaattttgtcagcagtagtgccgtttgcttttgcaatgtcatttactgtatcaccaggtttaacgacatgtactccgttgccgtcttctttaccaggtttgttgttgtcttctttgccaggcttgttgccatcttctttaccaggttttttgttgtcttctttaccaggtttgttgccgtcttctttgccaggcttgttgttgtcttctttgccaggtttgttgccgtcttctttaccaggtttgttgccgtcttctttaccaggtttgttgttgtcttcctcttttggtgcttgagcatcgtttagctttttagcttctgctaaaatttctttgctcactgaaggatcgtctttaaggctttggatgaagccgttacgttgttcttcagttaagttaggtaaatgtaaaatttcatagaaagcattttgttgttctttgttgaatttgttgtcagcttttggtgcttgtgcatcatttagctttttagcttctgctaaaaggttagcgctttggcttgggtcatcttttaagctttggatgaaaccattgcgttgttcttcgtttaagttaggtaaatgtaagatttcatagaaagcattttgttgttctttgttgaatttgttatccgctttcggtgcttgagattcatttaactttttagcttctgacaataggttagcactttgacttgggtcatcttttaagctttggatgaaaccattgcgttgttcttcgttcaagttaggcatgttcaagatttcatagaaagcattttgttgttctttgttgaaattgttgtcagctttcggtgcttgagattcgtttaattttttagcttcacctaaaacgttagtgctttggcttggatcgtctttaagactttgaatgaaaccattgcgttgcgcttcgtttaagttaggcatgttcaagatttcatagaaggcgctttgttgatctttgttgaagttattttgttgcgcatcagcttttggagcttgagagtcattaagtttttgagcttcacctaaaacgttagcactttggcttggatcatctttaaggctttggataaaaccattacgttgatcagcgtttaagttaggcatatttaacacttgataaaaagcattttgttgagcttcatcgtgttgcgcagcatttgcagcaggtgttacgccaccagatataagtaatgtacctaaagttacagatgcaatacctacacctagtttacgaattgaataaatgtttttctttttcaaattaataccccctgtatgtatttgtaaagtcatcataatataacgaattatgtattgcaatactaaaatctatatttataattaaatttaaatgtaagttttacaacttataaaataaatattttgctgaaagatttattcaggaagtaaaaggcttaaaaccgcaaaatcacgctatttcgattaataaaaacagataaaatatagagatattttttataatgaaagcggtttaatacatatgagttaaaaaatatttttaagaataaagtggggctttgaatgtgctgaggtttaatttcggaaatggttttaagtgatatagaaaatagaaagttgttcattatgtgctgaggttttattaaaaaatagaaaacacaagtgcactttagaatacagcacacttgcgtaatagagatattattcaaaaacaagatgtaaatgatctttatctgctaataattgattcacttgagctaataattgttcagcatggtcttgctgcgcgtcatccatatgaattaaaatttttctttcatcttcagttgagcgttcttttattagatagccttgcttttttaaattattgagagctctaacagtttgagggtatttatggtggattgtttcaattaaatctttaagaagaacgatgtttttattttgagaagtgataatagctagaattgtgaattctacaaaacttaatgttagatgttttttgataatattcttgaaatacattgtatacatcatcaagtttagaaattctttactatcttttggtatcatctgtgattcactttgatctgcaaggttaaattgtttaatgatttgatcaaacaatgtaacacgttctgcaattttctctcgttgttcttcagatattgaaatgtaagtattacgctcatcaattttacttcgaactttactaatatatgaatgtttcacaagtacttttatatgctgtactaaatccgattgtttataacataaatctgaaacaatcttcttaaatggaagtgtgttttcttgctgatgaaataaataagtcagtaatataaattcttttatagtcatatcgacttcaggcttgacttttttcttaaaacgaaacatatatgcttcaatgattataaaatctctaattttgtcatggttattatatttcattgttttatctccttgtatatgcactttattttaatataacacaatataataagaaaaataatccataatttacaattaaaaataatatgatatttttattaaaatttgtgtttttgaataaatgacattatcaaacactatatttaaataagaaatagttatcgatatttgaaaaatcgaagaatattgattgatattatagaatatgagtcggtgttatttgtatataaagtattaatatgtaattaagaaagtcgacgcttgttaacaataacaacaactatatgtataaaaaaacctcgcaactgttagttaactgaatcatttagctaacttcgttgtgaggtcattttgttttaataatatcgttataactttttcacggttaataataagtatatgaagaatggggcaccaaaagcagcaataaatacacctgctggcacttctttaggcaagaataaggtacgcccaattaagtctgcaataacaattgatatggcaccaatcattgctgacattagtaactttttagcataacttccgcgaacgattgttttcgcgatatgtggtgcgattaaaccgacaaacccaatgttacctactaaactgattgccatagatacgagtatagtagaagtgattaattggattagtttcatacgttgtacatgtaagcctaagccaatcgctacagggtcatcaagtatagatattttcatttttggtataacaagaaataacaacggcacaacagctaaaataaccatacccaagatgattgtatctttaaacgtagcaccgtaaagacttccgactagccatgtataagctttggcagcagataattgcttcgttgtaatgagtaatccttggacaagcgcaataaacaacgtttgcatcgaaataccgatgattatgagtgttgtcgggcgtatttgtcctttcgtttgaaacactaatagtatcatcattgcaattgcgccacctaatacagcgaatagtggaagtaaatgtatcgttaaatggctgaaaaatgcaataaagacaacggcacttaagctagcaccacctgtgataccgataatatcaggtgaggcaattggattttttaatacattttgcaacattaaaccactcattcctagtgcggcacctgctaaaatcgcaagtgtaatgcgaggtaagcgtaatacttctaaagtgaattgatccatactgtcatttggatttataaagtacatcagtacgcgttgtaatggtataaagcttgaaccactcatcatacttaccactgaaacgatggctaaaaagattaacgcgaagatgagatggtaattgtcttttttattaatcttttcggtcataagcgttgacgtcctttcttcataatatagattaagacaatagcgccaatgacagcggtaacgacaccgataggcaactctagtggcttaattattatacgagcaacaatgtctgaaatgatcattaggattgctccagctaatgcagtaaaaggaattaaatacttatagtttggtggtaataatcgtttgctaatattcggtacgataagacccacaaagacgattgctccagctacggctaccgaaataccggctaacatactgatgagcataataatcatccatttgattaattttatgttttgaccgaggccgattgcaatgtcgtcacttgtcatcaagatgttgatgtgtgcagccatgctaaatgcaattaaaataagtatcaatacaagcggaataatccatgggatatcccaaatattacgtaatgaaacggagccacttaaccaaaataataggccttgtaagtctgtttcgttcataataagtatgccttgagtaaaggctgtaaatagcatcgcaatcgcagcacctgccaaaatgacacggtgaggtgagaatagtgtttgtctaaacatacctagcgcaacaactaatacagtaacaacaatggcacctaaaaatgcaataactacaatcattttaaaagattgaatttggataaatgtaatactaaaaatgacaaaaaatactgcgcctgcattgacaccgaaaagccctggtgatgctattgggtttcgtgtaagtgcttgcatcaacaaacctgagacagcaagggcagcaccagtcaataacgcaatgattgttctcgacgcccgtgcaccagtgacaacatcatgtaaatcgttttcactatcaaagttgaataacgcctgtatcaccgtacctggtgacacaagcgtatttccaatcattaaacttaagatagctactattgcaagacataaaccagcaataacgatttggtattttggtttaagtagcatcgtaaaactccttaattattttgattgtttttcaatatttaacttttcatataaatcgtcaatcaattttaatgatgatttatatccgccagctaagttccaagtgatttcatctaaatcatcagatacttggttgtttttaactgcgtctaaatttttccattctttacttgaagtccattcgctttcagtctttttaactaatgcagcatctttcgcatttggatctgattttactacaaaaatatgatcagcgttcattaatggaatgctttctttggatgtaagttggataatatctttaccattatcaacttgtttttgtaagtctttattacgtttgaatcctaaatcatttaagatttcaccagcatatccaccagcataaattcttgtatgatcagcacggaagttaacaactgaagctttcaatggccatgcatctttatactttgcttttgcatctttttggaatgcagctactttatcatcgtactttttaagtaaatcttcagcttctttttctttccctaaagctttccccattaacttagttgtatctttgaatttgaaaactgtatcagtagaaactgttggtgcgattttagataattgatcgtaaactttttcatttctaacttttgacgcgacaattaagtccggttttaatttagagatttcctctaagttaggtgcaggttcttgacctacaatcttagtatcttttaaatcattttttatgtattcgaatttcggtttttgtgtccatgattctacagcacctacaggtttaacacctaaagatacagcgacgtcagtggcaccttgatatagcgtaacaacacgctttggtttccctttaatttcagttgtacccattgcatgtttaattgaagttgtttccttatctttgttatcagatgattgtttatttgaattcccactacatcctgctaaaacaagtaggaaagcaagcgtaacaacaagcattttaattactttattcattgactaattagcctccttcgtgatgtatgacaatgagaatcattatcacgatttagtatgaattaaattttttcctaagtcaataaaatatttatgatttacatgcaacttataattatttgacatataaatgcataaaaaatataatcctaattacttgatagtgagaatcattatcaattaggtaacacacaatattatagaattttaaatttgaggaggaagcgcttttgattgaaaaaagtcaagcatgtcacgattcattgttagattctgtagggcaaacacctatggttcaacttcatcaactatttccgaaacatgaagtgtttgcaaagttagagtatatgaatcctggaggcagcatgaaagatcgacctgccaagtacatcattgaacatggtattaaacatggtttaatcactgagaatacacatttaattgaaagtacttctggtaatttaggcattgcgttggcaatgatagctaaaatcaagggattaaaactcacgtgtgttgttgatcctaaaatatcaccaacaaatttgaaaattattaaaagttatggtgccaatgtagaaatggttgaagaacctgatgcacatgggggttatttaatgactcgtattgcaaaggtgcaagaactgttagccactattgacgatgcatattggattaatcaatatgcgaatgagttaaattggcaatcccattatcatggtgcaggcacagagattgttgaaacaattaagcaacctatagattattttgtcgcgccagtcagcacgacaggtagcattatgggtatgagtagaaaaataaaagaagtgcatccaaacgcacaaattgttgctgttgatgcgaaagggtcagtcatttttggtgacaaacctattaatagagaattacctggtatcggtgctagtcgtgtacccgaaatattgaatagatcagaaattaatcaagtgatccatgtagatgattatcaatctgctttgggctgtcgaaaactgattgattatgaaggcatatttgccggaggttcaacaggttcgattattgcagcgattgagcagttgataacgtcaattgaagaaggtgcaacaattgtcacgattttaccagatcgaggcgatcgttacttagatttagtttattcagatacatggttagaaaaaatgaaatcaagacaaggagttaaatcagaatgaatagagagatgttgtatttaaatagatcagatattgaacaagcgggaggtaatcattcacaagtttatgtggacgcattaacagaagcattaacagcccatgcgcacaatgattttgtacaaccgcttaagccgtatttaagacaggatcctgaaaatggacacatcgcagatcgaataattgcaatgccaagtcatatcggtggtgaacacgcaatttcaggtattaagtggataggtagtaagcacgacaatccatcgaaacgtaatatggagcgtgcaagtggtgtcattattttgaatgatccagaaacgaattatccaattgcagttatggaagcaagtttaattagtagtatgcgtactgcagcagtttcagtgattgcagctaagcatttggctaaaaaaggatttaaagacttaacaatcattggatgcgggctaatcggagacaagcaattacaaagtatgttagagcaattcgatcatattgaacgcgtgtttgtttacgatcaattctctgaagcatgtgcacgctttgttgatagatggcaacaacagcgtccggaaattaattttattgcgacagaaaatgctaaagaagcagtatcaaatggtgaagtagtcattacatgtaccgtaacggatcaaccatacattgaatatgattggttacaaaagggtgcatttattagcaacatttctatcatggatgtgcataaagaagtctttattaaagctgacaaagtcgtagtagacgactggtcacaatgtaatcgagaaaagaaaactattaaccaattggtgttagaaggtaaattcagcaaagaagcacttcatgctgaactaggacaacttgtgacaggtgacataccaggacgtgaagacgatgatgaaatcatattacttaatccgatgggtatggctatcgaagatatttcaagtgcttactttatttatcaacaggcacaacaacaaaatattgggacaacattgaacctatattaagaatgcgaggtgtctgaacattgcagaatcatacagcagtcaatacagcacaaacgataatattaagagatttagttgatgcattattatttgaagatatagccggtattgtatcgaatagtgatattactaaagaaaatggacaaacgcttttgatatacgaacgtgaaacacaacaaataaagatacctgtttattttagtgctttaaatatgtttcgttatgaaagctcacaaccaattacgatagagggaagggcgtctaagcaacctttaacagcagctgaattttggcaaacaattgctaatatgaattgtgatttaagtcatgaatgggaagtggctcgagttgaagaaggactgactactgctgccacacagcttgctaaacaattatcagaattagatttagcgtcacatccttttgtgatgtcagagcagtttgcaagtttaaaagatcgtccatttcatccattagctaaagaaaaaagaggattaagagaagcggattatcaagtgtatcaagctgaattaaatcaatcatttcctttaatggttgcagcagttaaaaagacacatatgattcatggcgatactgcaaatatcgatgaattagaaaatttgacagcacctataaaagaacaagcgacagacatgttaaatgatcaagggttatcaatagatgactatgtactatttccggtacatccttggcaatatcagcatattttgccgaacgtctttgcgaaagagattagtgaaaagttggttgtactattaccgttaaaatttggagattatctgtcgtcttcaagtatgcgttcattaattgatattggcgcaccgtataaccatgtcaaagtaccatttgcaatgcagtcattaggggcattaaggctaacgcctacgcgttacatgaaaaacggagaacaagcagaacaattattacgtcagcttatagaaaaagatgaagcactagctaagtatgtcatggtttgtgatgaaacagcttggtggtcatatatgggtcaagataatgatattttcaaagatcaattaggtcatctaactgttcagctaagaaaatatcccgaagtgctagccaaaaatgatacgcaacagctagtgtcaatggcagcactcgcggcaaatgatcgcactttatatcaaatgatttgtggaaaagataatatttctaaaaatgatgtcatgacgttatttgaagatatcgcgcaagtctttttaaaggtaacactatcatttatgcaatacggcgcattaccagagttgcatggtcaaaatatattgttgtcatttgaagatggacgtgtacaaaaatgcgtgttacgtgatcatgatactgtcagaatttataaaccatggctaacagcacatcagctttcattgccgaagtatgtcgtcagagaagatacacctaatacgctaattaatgaagatttggaaacattctttgcttattttcaaacattagctgtatcggtaaatctatatgccattattgatgcaattcaagatttatttggtgtaagtgagcatgaacttatgtcgttgttaaaacaaattttaaagaatgaagtggcaactatttcctgggttacaactgatcagctagctgtcagacacattttatttgataaacagacgtggccattcaaacaaattttattaccattgctatatcaacgtgatagtggtggaggtagtatgccttcaggtttaactaccgtaccaaatccaatggtgacatatgattaatcagtctatatggcgcagtaactttcgcattttatggctcagtcagtttatagcgattgctggactgacagtacttgtgccattattgccaatttatatggcatcactacaaaatctatcagtcgtagaaatacagttgtggagtggtatagcgattgctgctccagctgtaacgacgatgatagcttcgccgatatgggggaagctaggtgataagattagccggaaatggatggtgttaagagcgttacttggtttggcggtatgcttatttttaatggcattgtgtacgacaccattacagtttgtacttgtgaggttattgcagggactatttggtggtgttgttgatgcatcaagtgcgtttgcgagtgcagaggcgccagctgaagatcgtggaaaggtattaggaagactgcaaagttcagtcagcgcagggtctcttgtggggccattaattggcggtgttacagcttcgatattaggttttagtgcgttactgatgagtattgccgttattacttttattgtctgtattttcggtgcattaaaattgattgaaacgacacatatgccaaaatcacaaacaccaaatattaataaaggtattcgccgttcatttcaatgtctattatgcacacaacaaacatgtcgatttattatcgttggcgttttagcaaactttgctatgtatggcatgctaactgcattatcaccacttgcttcatcagtgaatcatacagcgatagatgaccgtagtgtgattggatttttacagtccgcattttggacggcttcgatattaagcgcgcctttatggggacgctttaatgataaatcatatgttaaatcagtatatatatttgccacgattgcatgtggttgtagtgcgatactgcaaggtttagcgacgaatatagagtttttaatggctgcaagaatacttcaaggattaacatatagtgcattgattcaaagtgtcatgtttgttgtcgtgaatgcgtgtcatcaacaacttaaaggcacatttgttggaacgacgaacagtatgttagttgttggtcaaattattggcagtcttagtggcgctgccattacaagttatactacaccagctactacgtttatcgttatgggcgtagtatttgcagtaagtagtttatttttaatttgttcaaccatcactaatcaaatcaacgatcacacattaatgaaattatgggagttgaaacaaaaaagtgcaaaataaagaattaatacaacatgcagcgtatgcggctatcgaacgcattttaaatgaatattttagagaagaaaatttatatcaagtaccacctcaaaatcatcaatggtctatacaattatcagagctcgaaactttaacgggtgaatttcgctattggtctgcgatggggcatcatatgtatcatccagaggtatggcttatcgatggaaaaagtaaaaaaataacaacttataaagaagcaattgcgcgtattttgcaacatatggctcaaagtgcagataatcaaacggcagtgcaacaacatatggcgcaaattatgtctgacatcgataatagcattcatcgcacggcgcgttatttgcaaagtaacacaatagactacgtagaggatcgttatatcgtttcagaacaatctttatacttaggtcatccatttcatccgactcctaagagtgcaagtgggttttcagaagcagatttagagaaatatgcacccgaatgtcatacatcattccaattgcattatttagctgtgcatcaagatgttctgctcacgcgctatgtagaaggtaaagaagatcaggttgagaaagtgttgtatcaattagcagacatagatatatcagagatacccaaaaattttattttattaccaacacatccttatcaaatcaatgtgttgcgacagcatccacagtatatgcaatatagtgaacaaggtttaataaaagaccttggcgtttccggtgattcagtgtacccgacgtcttcggttagaactgtattttcaaaagcattaaacatttatttaaaattaccgatacacgttaaaatcactaattttatacgtacgaatgaccttgaacagattgaacggacaattgatgccgcgcaagttatcgcatcagtcaaagatgaggttgaaacaccccattttaaattgatgtttgaagaaggatatcgtgcattgttaccgaatccattagggcaaacagttgaacctgaaatggatttattaacaaatagtgccatgattgttcgtgaagggataccgaattaccatgctgataaagatattcatgtattggcgtcattatttgaaacgatgcctgattcaccgatgtctaagttatcacaagtgattgagcaaagtggtttagcaccagaagcatggcttgaatgttatttgaatcgtacattattgccgatattaaagctgtttagtaacacaggcattagtctagaagcacatgtacaaaatacattaattgaattaaaagatggcatacccgacgtatgctttgtcagagatcttgaaggcatttgtctatctagaacgattgctactgaaaaacaacttgtgccaaatgttgtggcagcatcaagccctgttgtatatgcacatgatgaagcatggcatcgtcttaaatattacgttgtagtaaatcacttaggacatttagtatcaactattggtaaagcgactagaaatgaagttgtgttatggcaacttgtagcgcatcgtcttatgacttggaaaaaagaatacgcgaataacgcagtgtttgttgactgtgtagaagatttatatcaaacgccgaccattgcggctaaagcgaatttgatgagtaaattgaatgattgtggtgcaaaccctatttatacacatataccaaatccaatttgtcataacaaggaggtatcgtattgtgaatcaaacaattcttaatcgtgtaaagactagagtgatgcaccaactggtatcatcacttatttatgagaatattgttgtgtataaagcgtcatatcaagacggtgccggtcattttacaatagaaggacatgattcagagtatcgttttactgctgaaaagacacatagctttgatcgtatacgtatcacatcaccaattgagcgtgtcgtaggagatgaggcagatacaacaacagactatacacaattattgagagaggttgtatttacatttcctaaaaatgatgaaaagctagaacaatttattgttgagttattacagacagaattaaaagatacacaaagtatgcagtatcgagaatcaaacccaccagcaacacctgagacatttaacgactatgaattttatgcgatggaagggcatcagtatcatccaagttacaaatcacgtttaggatttacgttgagtgataatttgaaatttggtcctgattttgtaccaaacgttaaactgcagtggttagctatcgacaaagataaagtagaaacgacggtatcaagaaatgttgtagttaacgaaatgttacgtcaacaagttggcgataagacttatgaacattttgtacagcaaattgaagcgtctggcaaacatgtaaatgatgttgagatgatacctgtacacccatggcagtttgaacatgtcatccaagttgatttggctgaagaaaggcttaatggcacagtactatggttaggggaaagtgatgagctatatcatcctcaacaatcgattcgtacgatgtcgccaatagacacgacaaaatattatttaaaggtaccaataagtataacgaacacttcaacgaaacgagtgttggcgcctcatacaattgaaaatgcagcgcaaattacggattggttaaagcagatacagcaacaagatacgtatttaaaagatgaattaaagacagcttttctaggggaagtcttaggacagtcttatttaaatacacaactttcgccttataaacaaactcaagtttatggtgcgttaggtgttatatggcgtgaaaatatatatcacatgttaatcgatgaagaggatgcgataccatttaatgcactttatgcaagtgataaggatggtgtaccattcattgaaaattggattaaacaatatggttctgaagcttggacaaagcaatttttagctgtagcgattcgtccaatgattcatatgctttattatcacggtattgcctttgaatcgcatgcacaaaatatgatgctcattcatgaaaatggttggcctacacgtattgccttaaaagatttccatgatggtgttcgttttaagcgtgagcatttaagtgaagctgcttcacacctgacattaaagccaatgccagaagcacataaaaaagtgaatagtaattcatttattgaaacagatgacgaacgtttagtacgcgactttttacatgatgcatttttctttattaatatcgccgaaatcatcttatttattgaaaagcaatatggtatcgatgagcagcgacaatggcaatgggttaaagacattatcgaggcgtatcaagaagcatttccagagttgaataactatcaacatttcgatttgtttgaacctacgattcaagttgaaaagttaacgacacgtcgattattaagtgactccgagttaagaattcatcatgttacaaatccattaggtgtaggaggtatcaatgatgcaacaactatctctgaaacatagattaaacaatggtgattcagtttatggcatttttaattctataccggacccattgatgatcgaggttatcgcagcaagcgggtatgactttgttgtgattgatacagaacacgtggcgattaatgatgagacactagcgcatttaattcgtgcagctgaagcagcgcatattataccaattgtacgtgtcactgcagtgatagatagagatatcattaaagtgttagatatgggtgcgagaggtattattgtgccacacgttaaagatcgtgagacagttgagcatattgtgaaattaagtcgttattacccgcaaggattaagaagtttgaatggtggtcgcatggcaagatttggacgtacaccattacttgatgcaatggagatggctaatgagcatattatggtgattgccatgatagaagatgttgaaggggttatggccattgacgatatagcacaagtcgaaggtttagacatgatagtcgaaggtgccgcagatttatcgcagtcacttggcataccatggcaaacgcgtgatgatcaagtaacatcacatgttcaacatatttttgaggttgtgaatgcacatggtaaacatttttgtgcattaccacgtgaagatgaagatattgcaaaatggcaggcacaaggtgtacaaacatttattttaggtgatgatcgcggaaaaatatatcgccatttaagtgcatctctagcgacgtctaaacagaaaggggatgatggctaatgcgtatagttcaacctgttattgaacaattaaaagcacaatctcatccagtttgtcattatatctatgatttagtcggactggaacatcatttgcaacatattacattgtcattgccgagtaattgtcaaatgtactatgcaatgaaagcaaatagtgaacgaacaatcctagatacaattagtcagtatgttgaaggattcgaagttgcatctcaaggtgaaatagcaaaaggtcttgcttttaaaccagcaaatcatattatttttggaggccctggtaagacagacgaggaactaagatatgcagtaagtgaaggtgttcagcgtattcatgttgaaagtatgcatgaattacaacggctaaatgccatcttagaagatgaagataagacacaacacattttattgcgtgttaatttagcaggaccatttcccaatgcaacgttgcatatggcaggacgcccaacacaatttggtatttctgaagacgaagttgatgatgtcattgaagctgcgctagcaatgccaaatattcatctagatggctttcattttcattctatttctaacaatttagactcgaatttacacgtcgatgtagtgaaactttattttaaaaaagcaaaatcatggtctgaaaaacatcgatttccactcaaacatatcaatcttggtggtggtataggggttaactatgcagatttaactagccaatttgagtgggataattttgtagaaaattttaaaacacttatcgttgagcaagaaatggaagatgtgacattgaactttgaatgtgggcgctttattgtggcacatattggttactatgtgacagaagtgctagatattaagaaagtgcatggtgcttggtatgccattttaagaggaggtacgcaacaatttagactgccggtatcttggcagcataaccatccttttgaaatttatcgctataaggacaatccatattcatttgaaaaagtttcaatttcgagacaggacacaacgttagtcggtcaattatgtacaccgaaagatgtctttgctagagaagtacagatagacgcaatcagtacaggcgacgttattgttttcaaatatgcaggtgcatacggatggtctatttcacatcacgatttcttaagccatccacatcctgaatttatttatttaacgcaaacaaaggaggatgaataactattgaatcatattcatgaacatttaaaattggtaccagtagataagattgatcttcacgaaacattcgaacctttaagattggaaaagacgaaaagtagtattgaagcagatgattttatacgtcatcctattttagtgacagcgatgcaacatggtagatatatggttatagatggtgtgcatcggtatacaagtttgaaagcgttaggatgtaagaaagttccagtgcaagaaatccatgaaacacaatattcaattagtacgtggcaacataaagttccatttggtgtgtggtgggaaacgttacaacaagaacatcgcttgccatggactactgagacaagacaagaagcgccatttattacgatgtgtcatggtgatacagaacaatatttgtatacgaaagatttaggcgaagcacattttcaagtatgggaaaaggttgtcgcaagttatagtggttgttgttctgtagagagaattgcacaaggtacatatccttgtctttctcaacaagatgtactcatgaagtatcagccattgagttataaggaaattgaagcggttgttcataaaggggaaactgtgccagcaggtgtgacacgctttaatatttcaggacgatgtcttaatcttcaagtaccactggcattacttaaacaagatgatgatgttgaacaactgcgcaattggaagcagtttttagcagataagtttgccaatatgagatgctatactgaaaaagtatacttggtggagcaatagttttactgtgatgttgagggaaatatgatgatttagcgtattgatagcgaaaatataataaaacaatatagtgtggagaacttttgatattttataaatattgaagttctccatttttgtattttgcatataaaaattaaataaaataaggtatattaaggtaaagtataaattttaaataaatggggaatgagtatgagctcaattataggaaaaatagcaatttggataggcatcgtagctcaaatatattttagtgtcgtttttgttaggatgatatctattaatattgctggaggatctgattacgaaacaatttttttattaggattaatattggctcttttcactgttttaccaaccatctttactgcgatttatatggaaagttactctgtaatcggaggtgcactttttattgtttatgctattattgcactgtgtttatataatttcttttcgtcaattttatggctgattggtggtattttgctgatttggaataaatactcaaaagatgaatcgacagacgaaaatgaaaaagttgatattgaaagtacagagaatcaatttgaatctaaagataaaatcactaaagaataaagagaatatttaaggcggagtataaatattaaataaatggggaatagacatggaaaaaaatgtagaaaaatcattcataaagataggtttatattttcaaatagcttatatagtactcatggctataactttatgtgggtttgtaatttgctatggactaattttcggccttttctatttattatcaggtagcacagctgattattcaatagtaacaatagttatatcggcaataatttctatatttgtaattatactttcaatcgtacctgtcatcgtattggcatctgacttatttaaagaaaggatttcaaaaggtgtcatattaattgtattggctattatcgctttagtattatgcaactttgtatctgcaatactctggtttgtttcagccatatctattttaggtagaaaaaaattagtatctacagcagatactaccactattcaaaaaagtaaagggaacgcaaatcaagcatcacataaagacacgtgtaaaaaggaacttgatagtcaagacatgatggaacatcctgagtttaaaaatcccacgactaaaaacctagaaggattaaacgaagaaatacataaagatgaagctacaactaaagttgacagtgataacacgcaaccgccgattgaatcaaaagaccatgtctcgaaaaaagattgatgacaaactaatcgagagacttaaaaaaataatattcaacataagaacttttaaaacgacatttaaacacattgccaatcactaatggtagtgcgtttaactataccttaaatatctgaatattttgttaaatggagctacctttgttgtactattcaaatgaagaggagtaaaatgtaattaaaggaaagtaatttgaggagtgatctttatgacaaacaacaaagtagcgttagtaactggcggagcacaagggattggttttaaaattgcagaacgtttagtggaagatggtttcaaagtagcagttgttgatttcaatgaagaaggggcaaaagcagctgcacttaagttatcaagtgatggtacaaaagctattgctatcaaagcagatgtatcaaaccgtgatgatgtatttaatgcagtaagacaaactgcagctcaatttggcgatttccatgtcatggttaacaatgccggccttggaccaacaacaccaatcgatacaattactgaagaacagtttaaaacagtatatggcgtgaacgttgcaggtgtgctatggggtattcaagccgcacatgaacaatttaaaaaattcaatcatggcggtaaaattatcaatgcaacatctcaagcaggcgttgagggtaacccaggcttgtctttatattgcagtacaaaattcgcagtgcgaggtttaacacaagtagccgcacaagatttagcgtctgaaggtattactgtgaatgcattcgcacctggtatcgttcagacaccaatgatggaaagtatcgcagtggcaacagccgaagaagcaggtaaacctgaagcatggggttgggaacaatttacaagtcagattgctttgggcagagtttctcaaccagaagatgtttcaaatgtagtgagcttcttagctggtaaagactctgattacattactggacaaacaattattgtagatggtggtatgagattccgttaataatcatgcattagcgataaataaatccttattgttaagtttaatcacttagcagtaaggattttttagtgcacttagaagggagtgtattggtagaaaattaataagcgaagttcttaaatgagttatgatgtcactgtctaatgcatcagttgaaagcattactagtattaacacacccaagatattataaaacatcacaaaaacaccactatctaatttatctcaataaaaattcacaaagttatctcattttatttttataaataaaaaatatcgataaaaagcttacaatactttatgtttttatgatatatttttaatgtataaatgaggtggaagatttggaaagagttttgataactggtggggctggttttattgggtcgcatttagtagatgatttacaacaagattatgatgtttatgttctagataactatagaacaggtaaacgagaaaatattaaaagtttggctgacgatcatgtgtttgaattagatattcgtgaatatgatgcagttgaacaaatcatgaagacatatcaatttgattatgttattcatttagcagcattagttagtgttgctgagtcggttgagaaacctatcttatctcaagaaataaacgtcgtagcaacattaagattgttagaaatcattaaaaaatataatagtcatataaaacgttttatctttgcttcgtcagcagctgtttatggtgatcttcctgatttgcctaaaagtgatcaatcattaatcttaccattatcaccatatgcaatagataaatattacggcgaacggacgacattaaattattgttcgttatataacataccaacagcggttgttaaattttttaatgtatttgggccaagacaggatcctaagtcacaatattcaggtgtgatttcaaagatgttcgattcatttgagcataacaagccatttacattttttggtgacggactgcaaactagagattttgtatatgtatatgatgttgttcaatctgtacgcttaattatggaacacaaagatgcaattggacacggttataacattggtacaggcacttttactaatttattagaggtttatcgtattattggtgaattatatggaaaatcagtcgagcatgaatttaaagaagcacgaaaaggagatattaagcattcttatgcagatatttctaacttaaaggcattaggatttgttcctaaatatacagtagaaacaggtttaaaggattactttaattttgaggtagataatattgaagaagttacagctaaagaagtggaaatgtcgtgaaaatgacattgaagctgtccataataataagggttatgcctatcaaagaaaattagacaaactagaagaagtgagaaaaagctattacccaattaaacgtgcgattgacttaattttaagcattgttttattatttttaactttaccgattatggttatattcgccattgctatcgtcatagattcgccaggaaaccctatttatagtcaggttagagttgggaagatgggtaaattaattaaaatatacaaattacgttcgatgtgcaaaaacgcagagaaaaacggtgcgcaatgggctgataaagatgatgatcgtataacaaatgtcgggaagtttattcgtaaaacacgcattgatgaattaccacaactaattaatgttgttaaaggggaaatgagttttattggaccacgcccggaacgtccggaatttgtagaattatttagttcagaagtgataggtttcgagcaaagatgtcttgttacaccagggttaacaggacttgcgcaaattcaaggtggatatgacttaacaccgcaacaaaaactgaaatatgacatgaaatatatacataaaggtagtttaatgatggaactatatatatcaattagaacattgatggttgttattacaggggaaggctcaaggtagtcttaatttacttaataagttcaaataaaagttatattttaaagattgtgaccaattgttacagtataacgaggaatcccttgagacagtatcaaatggcattaagaaatatgtgccatcattgatttgcatggctataaatactattcatctgatgagatagccatgttaagaaattgaaagtatagcattaaaggggtttgtaacagttgaaaattatatattgtattactaaagcagacaatggtggtgcacaaacacatctcattcaacttgccaaccatttttgcgtacaccatgatgtttatgtcattgtaggcaatcatggaccaatgattgaacaactagatgcaagagttaatgtaattattatcgaacatttagtaggtccaattgactttaaacaagatattttagctgtcaaagtgttagcgcagttattctcgaaaattaaacctgatgttatccatttacattcttccaaagctggaacggtcggacgaattgcgaagttcatttcgaaatcgaaagacacacgtatagtttttactgcacatggatgggcttttacagagggtgttaaaccagctaaaaaatttctatatttagttatcgaaaaattaatgtcacttattacagatagcattatttgtgtttcagatttcgataaacagttagcgttaaaatatcgatttaatcgattgaaattaaccacaatacataatggtattgcagatgttcccgctgttaagcaaacgctaaaaagccaatcacataacaatattggcaaagtagttggaatgttgcctaataaacaagatttacagattaatgccccgacaaagcatcaatttgttatgattgcaagatttgcttatccaaaattgccacaaaatctaatcgcggcaatagagatattgaaattacataacagtaatcatgcgcattttacatttataggcgatggacctacattaaatgattgtcagcaacaagttgcacaagctgggttagaaaatgatgtcacatttttgggcaatgtcattaatgcgagtcatttattatcacaatacgatacgtttattttaataagtaagcatgaaggtttgccaattagcattatagaagctatggctacaggtttgcctgttatagccagtcatgttggcggtatttcagaattagtagctgataatggtatatgtatgatgaacaatcaaccagaaactattgccaaagtcttggaaaaatatttaatagacagtgattacatcaaaatgagtaatcaatctagaaaacgttatttagaatgttttactgaggagaaaatgattaaagaagtggaagacgtttataatggaaaatcaacacaatagtaaattactaacattgttacttatcggtttagcggtttttattcagcaatcttcggttattgccggtgtgaatgtttctatagctgactttatcacattactaatattagtttatttactgtttttcgctaaccatttattaaaggcaaatcattttttacagtttttcattattttgtatacatatcgtatgattattacgctttgtttgctattttttgatgatttgatatttattacggttaaggaagttcttgcatctacagttaaatatgcatttgtagtcatttatttctatttagggatgatcatctttaagttaggtaatagcaaaaaagtgatcgttacctcttatattataagcagtgtgactataggtctattttgtattatagctggtttgaacaagtcccctttactaatgaaattgttatattttgatgaaatacgttcaaaaggattaatgaatgaccctaactatttcgcgatgacacagattattacattggtacttgcttacaagtatattcataattacatattcaaggtccttgcatgtggtattttactatggtctttaactacaacggggtctaagactgcgtttatcatattaatcgtcttagccatttatttctttattaaaaagttatttagcagaaatgcggtaagtgttgtgagtatgttagtgattatgctgatattactttgttttactttttataatatcaactactatttattccaattaagcgaccttgatgccttaccgtcattagatcgaatggcgtctatttttgaagaggggtttgcatcattaaatgatagtggatctgagcgaagtgttgtatggataaatgccatttcagtaattaaatatacattaggttttggtgttggcttagtggattatgtacatattggctcgcaaattaatggtattttacttgttgcccataatacatatttgcaaatttttgtggaatggggcattttattcggtgcgttatttatcatatttatgctttatttactgtttgaattatttagatttaacatttctgggaaaaatgtaacagcaattgttgtaatgttgacgatgctgatttactttttaacagtatcatttaataactcaagatatgtcgcttttattttaggaattatcgtctttattgttcaatatgaaaagatggaaagggatcgtaatgaagagtgattcactaaaagaaaatattatttatcaagggctataccaattgattagaacgatgacaccactgattacaatacccattatttcacgtgcatttggtcccagtggtgtgggtattgtttcattttctttcaatatcgtgcaatactttttgatgattgcaagtgttggcgttcagttatattttaatagagttatcgcgaagtccgttaacgacaaacggcaattgtcacagcagttttgggatatctttgtcagtaaattatttttagcgttaacagtttttgcgatgtatatggtcgtaattactatatttattgatgattactatcttattttcctactacaaggaatctatattataggtgcagcactcgatatttcatggttttatgctggaactgaaaagtttaaaattcctagcctcagtaatattgttgcgtctggtattgtattaagtgtagttgttatctttgtcaaagatcaatcagatttatcattgtatgtatttactattgctattgtgacggtattaaaccaattacctttgtttatctatttaaaacgatacattagctttgtttcggttaattggatacacgtctggcaattgtttcgttcgtcattagcatacttattaccaaatggacagctcaacttatatactagtatttcttgcgttgttcttggtttagtaggcacataccaacaagttggtatcttttctaacgcatttaatattttaacggtcgcaatcataatgattaatacatttgatcttgtaatgattccgcgtattaccaaaatgtctatccagcaatcacatagtttaactaaaacgttatctaataatatgaatattcaattgatattaacaatacctatggtctttggtttaattgcaattatgccatcattttatttatggttctttggtgaggaattcgcatcaactgtcccattgatgaccattttagcgatacttgtattaatcattcctttaaatatgttgataagcaggcaatatttattaatagtgaataaaataaggttatataatgcgtcaattactattggtgcggtaatgaatttagtattatgtcttgttttgatatatttttatggaatttacggtgcggctattgcacgtttaattacagagtttatcttacttatttggcgatttgttgatattactaaaatcaatgtgaagttgaatattgtaagtacgattcaatgtgtcattgctgccgttatgatgtttattgtgcttggtgtggtcaatcattatttgccccctacaatgtacgctacgctgctattaattgcgattggtatagtagtttatcttttattaatgatgactatgaaaaatcaatacgtatggcaaatattgaggcttcttcgacataaaacaatttaagtatcggtaacgctatactttagaaatttaagattaagaagaaaaggcaatttcttattgaaaaatggaagttgtcttttttaattctctttaaaagcgggaaacaaaagcagttaaatgcctttttgcattcaatattaaatattatatcaatttcgaatatttaaattttatataattggatataacaaataaataataattattgcaaaacacacccgaaattaattattataaaagtatattcataaaaggaggaatatacttatggcatttaaattaccaaatttaccatatgcatatgatgcattggaaccatatatagatcaaagaacaatggagtttcatcacgacaaacatcacaatacgtacgtgacgaaattaaacgcaacagttgaaggaacagagttagagcatcaatcattagcggatatgattgctaacttagacaaggtaccggaagcgatgaggatgtcagtccgtaataatggcggtggtcattttaaccattcattattctgggaaatactatcacctaattctgaagaaaaaggtggcgtaatagatgacatcaaagcgcagtggggcactttagatgaatttaaaaatgaatttgcaaataaagcaacaacattatttggatcaggttggacttggttagttgttaatgatggcaaattagaaattgtgacaacgccaaaccaagataatccattaacagaaggcaaaacaccaatcttactatttgatgtttgggagcatgcctactatctgaaatatcaaaataaacgtccagactatatgactgcattttggaatattgttaactggaaaaaagttgatgaattataccaagcagcaaaataatataacttaatataattgaggtggagcatctacaaggtgttccacttttttgtacttaatatctttacttatttgtttttgtgtaatgggatagcacgtaaaagtggcaaaataataagataaatttcaactcgaaataccttattattgttgactataatgatgacctaaatgttatacacatcagaaaatactattaattaatcaacatattgacattaaataaattgacaaaataagtaattattgtgaatctaaagtgaaatttttataaaaaaatgtaatgattcaaaaattttgttgcatttcttttgtaatcgtatgataatgtaaatgtaatcaaattgtaatataaggggacaagacaatgaaaaaattagcaacagtaggttctttaattgtaacaagcactttagtattctcaagtatgccttttcaaaatgcgcatgccgacacaacttcaatgaatgtgtcgaataaacaaagccaaaatgtacaaaatcatcgtccttatggcggagtagtaccacaaggaatgacgcaagcacaatatactgaattagagaaagctttatcccaattaagcgctggcagtaatatgcaagactataatatgaaattgtatgatgcgacgcaaaatattgctgataaatacaatgtgataattacaactaatgtaggggtatttaaaccacatgctgttagagatatgaatggccatgcgttacctttaacaaaagatggcaatttttatcaaacgaatgtagatgcaaatggtattaatcatggtggtagtgaaatggtgcaaaataaaacaggtcatatgagtcaacaaggccatatgaatcagaacacacacatgaaccaacagccacacatgcaacaaggtcatatgcaatcatcaaaccatcaaatgatgagtccaaaagcaaatatgcattcatcaaatcatcaaatgaaccaaagtaacaaaaaagttttaccagctgctggtgaaagtatgacatcaagtattcttactgcaagtattgccgcactactattagtatctgggttattcttagcatttagacgacgttcaacaaataaataaacataatacgattaataatagaaaaatcgtgtgattatctgagcgagcctaggacataaatcaatgtcctaggctcgctaatgttatattggcagtagttgactgaatgaaattgcgcttgtaacaagcttttccatttcttaccaactccctaaatagtcatcaaaaaatttcttatattttaataattttaataatccgattgtcttatacgtgtcagtgttaattcagagatttcctgtggaatataccacttattaatcataattggataaggtgtttgtgcgtacaatgtttcaataatcagccaacaatgtgtatcaccatcaaacacgtgactatgatttttgaagtggggcgctttggtaatagacatttttaaatctgattgatatgcattgctataaatcgtttgctcaacgaatgtcttcatgtcgtcttcgttttgtgtattcactttaaatgtgtcaatgacatttaacggtataaaggtaaagcaaaatgcatcagcttgcttagaatgattgtcctttttttgataatagcgttccattgcaatgacggcagaaggatggtttgcaaacaaatgatttgtatattcactttctaaatcaacacgataattaattgatgacatagatacgcgagctagcaatatttgatcaagtggatgcttaaattgatccatacttgaagcgtgttgggcatttgtttgtggaataacaaagtgtcccttccctcttgtactctctacgatgccatcttcggctaacaattttatagcttggcgcaaagtcatacgactgacatcaaagcgcgcacaaagttccttttcagtaggtaatgcatggccactcggatattttcctatttgaatttctttatataacgtattataaatcgttaaaaattttggttgtgtttgcgtcacgtagacaacctccataaagttacttaatcactctcatcatacaataatttttactcgaattggaaaaattataaaaattaaatatagataggctttgaaaattagttttatacaaggttagtagctgtaactgtaaaatgttcttaatattgtcaaaatgtaatgcttgaaagcgcttttaaaaaatattattatatacatggttagacaaatagacaaatcactatacaaatattgggaggaatattttatgaaatcaacaccacacattaaaccaatgaatgacgtcgaaattgcagaaacggttctattgccaggagatccgttaagagctaagttcattgcagaaacttatttggatgatgtggaacagttcaatacagtgcgaaacatgtttggttttaccggaacatataaaggtaaaaaagtttctgtcatgggttcaggtatgggtatgccatctattggcatttactcttatgaattaattcatacatttggttgtaaaaaattaattcgcgttggttcttgtggcgcgatgcaagaaaacattgatttatatgatgtgattattgcacaaggtgcctctactgattcaaattacgttcaacaatatcaattaccaggtcattttgcgccaattgcttcttatcaattattagaaaaagcagttggaacagcacgtgacaaaggtgtacgtcatcatgtaggtaatgtgttatcaagtgatattttctataacgcggatacaacagcgagtgaacgttggatgcgtatgggtattttaggtgtagaaatggaatcagctgcattatacatgaatgcaatttacgctggtgtcgaagcattaggtgtgttcacagtgagcgatcatttaattcatgaaacgtcaacaacacctgaggaaagggaacgtgcatttacagatatgattgaaattgcactgtcattggtttagataattatgaatgttgaatattctaaaataaagaaagcagtacctattttattattcttatttgtattcagtttggttatagacaactcatttaaattgatttctgtagccattgctgatgacttaaacatttctgtaacgacagtaagttggcaagcgacattagccggtttagtaattggtattggcgctgtagtatacgcttcattatctgatgccattagtatacgcacactatttatttatggcgtgatattaatcattatcggatcaattattggttacattttccaacatcaattcgcattacttttagttggacgtattattcaaactgccggtttagccgctgcagagacattatatgtgatatatgttgcaaagtatctttctaaagaggaccagaagacttaccttggcttaagtacgagcagttattccttgtcattagttatcggtacattatcaggtggatttatttctacgtatttacactggacaaatatgtttttaattgcattaatcgtagtatttacgttgccattcctatttaaattattaccaaaagaaaataatacgaataaagctcatttagattttgttggcttaattctagtggcaactattgctacaacagtcatgctgtttattacgaactttaattggttatatatgattggtgccttaattgcgattatcgtttttgcgctatatattaaaaatgcgcaacgtccattagtaaataaatcatttttccaaaataaacgttatgcttcatttttatttatagtatttgtaatgtatgctatccaattgggttatatttttacgttcccattcataatggagcaaatttatcatctgcaactagacacaacatcactgttattagtaccgggttatatagtagcagtcatcgttggtgcactaagtggtaaaatcggcgaatatctgaattcaaaacaagcgattatcacagcaattattttaatcgcactgagcttgattttacctgcatttgcagtaggtaatcacatttcaatcttcgtcatttctatgatattctttgcaggtagctttgctttaatgtatgcacctttacttaacgaagccattaaaacaatagatcttaatatgacaggtgtggctattggtttttataatttaattattaatgtggcggtatctgtaggtattgcgattgctgcggctctaatcgattttaaagcattaaatttcccaggcaatgatgcattaagttcacatttcggtattattttaattattttaggtttaatgagtattgtcggattagttttattcgtcagcttaaatcgttggacacaatctgaaaaataaatagatataaattcgcgagatatattcgtatttatagtaaaattaaataaagagattatataacacgaggagtagtaagtatgaaatttgagaaatatatagatcacactttattgaagcctgagtcaacacgtacgcaaatcgatcaaatcatcgatgaagcgaaagcatacaattttaaatctgtatgtgtgaatccaacacatgttaaatatgcagcagagcgactagctgattcagaggtgctcgtttgtacggtaataggattcccattaggtgcgtcgacaactgcaacgaaagcatttgaaacagaagatgcaattcaaaatggtgcagatgaaattgacatggtcatcaacatcggcgcattaaaagatggacgttttgatgatgtacaacaagacattgaagcagtggttaaagttgcgaaaggtcacacagtaaaagtgattattgagacggtattgttggaccatgacgaaattgtaaaagcgagtgaattaacaaaagcggctggtgcggacttcgttaaaacttcaacaggttttgcaggtggcggtgcgactgcagaagacgttaaattaatgaaagatacagtaggtgctgatgtagaagtaaaagcatcaggtggcgtacgtaatttagaagatttcaataaaatggttgaagcaggtgcgacacgtattggtgcgagcgcaggtgttcaaattatgcaaggtttagaagcagattcagattactaatatatataaattttgggagtgatagctatgacaagaccatttaatcgtgtacatttaatcgtaatggattcagtaggtattggtgaagcgccagacgcagctgattttaaagatgaaggttcacatactttaagacataccttagaaggtttcgatcaaactttaccaaaccttgaaaagttaggtctagggaacatcgataaattaccagtagtaaatgcagttgaacaaccagaagcatactatactaaattgagtgaagcttcagttggtaaagatacaatgactggtcactgggaaattatgggtttaaatattatgcaaccttttaaagtataccctaatggattccctgaagagttaattcaacaaattgaagaaatgacaggtcgtaaagttgttgctaacaaaccggcatcgggtacgcaaattatcgatgagtggggcgagcaccaaatgaaaactggcgacttaattgtttatacaagtgcagacccagtattgcaaattgctgcacatgaagacattatcccattagaagagttatatgatatttgtgaaaaggttcgtgagttgacaaaagaccctaaatatttaattggtcgtattatcgcacgtccatatgttggtgaaccaggaaactttacacgtacatctaatcgacatgactatgcgttaaaaccttttggtaaaactgtcttagatcatttgaaagacggtggttatgatgttattgccatcggtaaaattaatgacatttatgatggtgaaggtgtaacagaagcggttcgtacgaagagtaacatggacggtatggatcaattgatgaaaattgttaagaaagatttcacaggtattagcttcttaaacttagtagactttgatgcattatacggtcatcgtcgtgataaaccaggttatgcacaagcaattaaagatttcgatgatcgcttgccagaactgtttagcaacttaaaagaagacgatttagtaattattacagcagaccatggtaatgacccgacagcgccaggtacggaccatacgagagaatatatcccagtaattatgtacagtccgaaatttaaaggtggtcatgcactagaaagtgatactacattcagttctatcggtgcaactatagcagataatttcaacgtaacattaccagagttcggtaaaagttatttaaaggaattgaaatagaataaatttagatataataaaaacagcagtgaagttaactataacaatagttttcttcactgctgtttttattataatagagaaacgtaagacggtaggacctcttatttaggagtatcctgatttaatgttaaacaatacgttttcggattgaaccggaaattaaatctacaattgcgaccattagtactaaaccgattaatataatacctacacggtcccaagaacgtgtttgaatggcaaatatgagtggtgtcccgataccaccagccccaattagccccagtatagaagctgaacgtaagtttagttcaaagcgataaagtatgagagatagaaaggcaggcataatttgtggtatgactgcaaatacgagtgttttaatcttattcgcaccactggcctttaatgattctatagcactgaaatctagaccttcaatatcttcagctaaaagtttcccaagcatacctacagaatggatacctaaagctaatacacctgaaaatgaacctgggccaacagctttgataaatataagtgccattacaatttctgggaagacacgtataacacttaaaataaatttgctaacacctgaaaccgggcgtaactttaccatattatttgcacctagaaatgctaatggaatacagataattgcggcgatgaaagtacctacaacggctatcgcaaaggtttcaagtaaaccacgtaataagtcttcgccatctggtatatagatatagctgatgtcaggatggaataatccgctgaatatggattttaagatttctaatgatttacttttaagttctaaacttggtacacctgcaaatgcccagatgataatagctaagacaacaattgcaataagccatcttttaatcaattttcgtttgtgtgcttttgtgtgaacattatattttgctatttcctgtgtcatgcgagatgtgccctcactttcgtactgatgtaatcaatgacgacgacaataactaaagtaaataaaataatcgttgctgtttttggatattgaaataaaccaagtgtttgatcataaaacaatccaataccgccagcgccgactaatccaagcacagctgaagcacgtatatttacttcaaatgcatataatacgtatgacataaatgacgatatggcttgtggtacaacaccgaaaacaatccattttattttattagcgccaacagccgtcattgcttccattggacctggatctatcgtttccaatgattcatataataattttccaataatacagatagttaaaataaacagtgctaatatccctggaatttgaccgattccaaatacagccacaaagattgctgctaatagcaaatccggtatagtacgaactatatttaaaataaaacgcgagggtattgaaatccacttttgatgaacgatattgctagcacataataacgcaattggtattgaaacgatgctacctaatactgtacttacgatagccattcgaatagtatctaacattggcgttgtaatttgttgtaaatactcgaaatcaggtggaatcatttgtttgaatagatcacctatttgaggtattcctatcattaaatctccaaaattaaaccccgtataaatgaagctccaaatgataagcacaatgattaacatgaaggtaaaactcgtttttaaagaaacctttttctttaaaagggagtcatactttgtaggtgtttctaaaggcatgttagttcactcctagcttttcatcttctttaattgtacgtccatatatttcactaaatacgtcatctgttgcttcagatgcaggaccatcatagacaacctcaccatcacgtaaaccaatgatgcgtgtgccatattcttttgctaagtcaacaaaatgtaagttaattaaaattgtgatgcctaattcttggttgatttttcttaaatcatccataacctgtttcgtagttaatgggtctaatgaagcaactggctcatctgcaagaataatttcagattcttggcatagtgcacgtgcaatagatatacgttgttgttgacctcctgataattcatcagagcgttgattatatttatctaagatgttgacccgttctagtgcatccattgctttaattttgtcttcttttgggaataaacctaataccattttccaagtagggtgataacctacacgtccacttagtacatttcgtaatacacttgaccgtttaactaaattaaaatgttggaaaatcatacctatatttcggcgcatttctaatagtgctttaccatgggctttagtgattgatttaccttggatgaaaatttcacctgacgtgatatcatgcaaacgatttacagatcttaataacgtggatttcccagcaccagatagtccgacaatgactgcaaattcacctttttcaatatttaagttaatatttttcaagcctacatgaccgttaggatagactttactgacgtttttaaattcgatttgactcatgtttgacacctttctttaataaagaaaagccaaggtaaactgaaatatcatagacattgggtttctgtgtacaaatggtttcaaatgtacagcgacacctttctatatctgtttcagtttagcgcctagcttttcaatattaatctagaatatatctattgaacgaaagcttttaataccaaattcgctaatgattcatttgttaaataatgattatttcatatctttaactaatttttcgtactctcttacaatgtcgaaatttgaatctttcgtttctgtgtatccttcatgtgaataaacttcgctaataattttgtgaccttcttttgatttagcaatgtctataaaagcttttttcaatttttcttggaaatctttatccatatctggtcttacagaaattgtgtcattcggaatagcttgtgttaattttaaaattcgtgtgtctttaaatacatttggttggtcttttttcacagtattacgtgcatcgttaaatacagccgcagcatctacatctccatttaataatgagataactgcttggtcatgacctttaacattcacaattttcatatctttagttgcattaatacctgcttcgttttttaacatcgcaagtgggaatgtatatccagcagttgatgttacatcttgtaaggcaattttcttaccttttaaatctttcaagcttttaatttttgagtcttttttaacaagaatttctgacttataactatctacaagttctttacttgctgaaccatcttcttttacaccgaaacgttgtgcttgtaataataaatcagctgctttttgatcatgtgctaatgtgtatgccgttggtggtaagaaaccaacatcaacttttttagacttcatagcttcaacaattgtattgtagttagttgatacagacactttaactggaatccctaattctttagatagtaatttttctaatggttttgctttagcctctaatgttccagcattttgcgaaggtacaaattgtactgttaattctttaggtttgtatcctcctgatttagaatccgaatcattactagcgttcttttgattatctaaagaacttgaatttccacatgctgctgcaaaaacaatgactgctaacattaatacaaataaacacttaaattttttcatttgataactgtccccttcacattcttaatcgtgtaatatgtatgcaatgaaattacacttatagcgtaccacatttaaatgcgaaaaagtattttataaaaatgaattttaataactttatttaagagtttgataagattttgtaaatttttcgttaaattgcccatttcaaacatatatttatcctataattcaagaagaaatttattttaaaaggagcctcacaaaatgaaaaaaatatataagtcattaactgtctctgcaattgttgcaacggtatcattaagtgctttaccgcaatctttagctataacgcatgaatcgcaacctacaaagcaacagcgaacggtattattcgatcgttctcatggtcaaacagctggtgctgcagattgggttagtgatggtgcattttcagattatgcggattcaatacaaaaacaaggttatgacgttaaagctattgatggtcattcgaacataacagaagcaagtttgaaaagttctaaaatatttgtaattcctgaggctaatattcctttcaaagaatcagaacaggcagcaattgttaactatgtgaaacaaggtggcaatgttgtctttatttcagatcattacaatgctgaccgaaatttaaatcgtattgattcatcagaggcaatgaatggttatcgacgtggagcatatgaagatatgtcgaaaggtatgaatgcagaagaaaaaagttctactgcaatgcaaggtgtgaaaagttcagattggttatctacaaactttggcgtacgttttcgatataatgcactaggtgatttaaatacgagcaatattgtttcttcaaaagagagtttcggtattactgaaggtgtgaaatctgtctctatgcatgccggatcaacattagcaattactaatccagagaaagcaaaaggtattgtgtatacaccagaacaattgccagcgaaaagtaaatggtcacatgctgtagatcaaggtatttataatgggggcggtaaagcagaaggcccctatgtagcaatttctaaagttggaaaaggtaaagcagcatttatcggtgattcatcacttgtggaagatagttcgcccaaatatgtaagagaagataatggagaaaagaagaaaacatatgatggttttaaagaacaagacaacggtaagctattaaataatataacggattggatgtctaaagatagtgatgggaaatcacttaaggcgagtggactaacattagatacaaagactaagttgcttgattttgaacgaccagagcgttcaactgagcctgaaaaagagccatggtcacaaccgccgagtggttataaatggtatgatccaacaacatttaaagcaggtagttatggcagcgaaaaaggcgcagatcctcagccaaacacaccagatgatcatacgccaccaaatcagaacgaaaaagtaacatttgatatcccgcaaaatgtttctgtaaatgagccatttgaaatgacaatacatttaaaaggatttgaagcaaatcaaacacttgaaaatcttagagttggtatttacaaagaaggcggacgtcaaatcggacaattttcaagtaaagataacgattataacccaccaggttacagtactttgccaacagttaaagcagatgaaaacggaaatgtcacaattaaggtcaatgctaaagtacttgaaagtatggaaggttcaaagattcgtttaaaactcggtgacaaaaccttgattacaacagacttcaaataaatatataatagaaataagaaagatgtttgtgattgaaggagtgagtgaggatgtcaaacatagcattttatgtcgtgagtgacgtacatggttatattttcccaacagattttacgagtagaaatcaatatcaacctatgggattgttactagcgaatcatgttatagaacaagacagaaggcagtatgaccaaagttttaaaatagataatggtgattttttgcaagggtcaccattttgtaattacttaatcgcgcatagcggcagtagccagcctttagttgatttttataatcgaatggcattcgactttggtacgcttggtaatcatgaatttaattatggattgccatacttaaaagacactttacgcagactcaattatccagttttgtgcgctaatatatatgaaaatgatagtacattgactgataacggtgtgaagtattttcaggttggagatcaaactgttggtgtgataggtttaacgacacaatttattccccattgggaacaaccagagcatattcagtcacttacgtttcatagtgcttttgaaatacttcaacaatacttacctgaaatgaagcgacatgcagatatcattgtggtttgttaccatggtggatttgaaaaggatttagaaagtggtacgccgaccgaagtattaacgggtgaaaatgagggatatgccatgttagaagcgttttctaaagatatagatatctttattacgggtcaccaacatcgacaaattgctgaaaggtttaagcaaacggctgtgattcaacctggtacgagaggtacaactgtaggcagagtagtcttgagtactgatgaatatgaaaatctatccgttgaatcatgtgaattacttcctgttatagatgattccacatttactattgatgaagatgaccaacatttacgaaagcagttagaggactggttagattacgaaattactacattgccatatgatatgacgattaatcatgcatttgaggcacgtgtggcaccgcatccttttacaaattttatgaattacgctttattagaaaaaagtgacgcagatgttgcctgtacagctttgtttgattctgctagtggtttcaagcaagtcgtgacgatgcgagatgttattaacaattacccatttccaaatacatttaaagttttagctgtaagtggtgccaaacttaaagaagccattgaacgatcagcagaatattttgacgtgaaaaatgatgaagttagtgtgagcgcagacttccttggacccaaaccacaacactttaattatgatatatatggtggcgtaagttataccattcatgttggaagaccaaagggacaacgtgtgagcaatatgatgattcaaggtcacgcagttgatttaaagcagacatatacaatttgtgtaaataattatcgtgcagttggcggtggtcagtatgatatgtttatcgacgcgccagttgtgaaagatattcaagttgaaggcgcacaattacttattgattttttatcaaataataatttgatgcgtatcccgcaagttgttgattttaaagttgaaaagtgacggatatatgaaaaacttacttgattttaatcgggtaagtttttgtttaaagcgagaaagtattatctttagacgacgtgattgaaatgtcacgtcctgtcaaaatgaatagtttattaaagttgtattttgatagaaatttactgacaccacaaaaattattgaattatttaaaagttgatgaaacatttttgaatcatctagcaggtattaatttaaaactctttaaggattatgttaatgaaaatagagaatataatataacgaatctatataaataaggcactaatatttaaacctcgagctgaaaagatcatcatttcagttcgaggttttttattttatcctctttgtatgggtattcttttacttgaaatttgttttcctgtttttttattgtaaatttttattacatagtatcctaagttatatcctgacatttgttctccagtatttttagttttttagtaggaacataatggtatttttttgctgttagtggaacatattttttagggttttgaatttcgtttcatccatgtgtaaaactggatactctaatatccggtaatagccggttaaattgacataggatgtcactagctattccaaaattgtcttttgacgctataacgattgttgggaatcttagcatgtctaacgcagagagactttcacattttatgagtactaatcctgaagttcggctttgggatattttacaaacaaactttaaagctaaagctcttaaagaaaaagtttatattgaatatgacaaaataaaagcaactctttggaatagacgtagtatgcgcgttgaatttaatcctaataagctttcgcatgatgaagtgctttggttaaaacaaaatatcatcagttatttggacgatgttagttttacgagattagatttggcttttgattttgaatttgatttaaatgactattatgcattgtcagataagtcggcaaagaaaactatattttatggacgtaatgtaaaaccagaaacaaaatattttggtgtgcgtaatagtgataggtttattcggatttataataaaaacaagaacgtaaagataatgcagatgttgaaattgattcaacatttctatggcgtgtggaaattgaattaaaacgagatatggttgattgttggaaagattgttttgatgatttgcatattttaaaaccgaatttaaaaatgattgaaaatatacaagaacgagcaatgcttcatttattaactcacgaagaagaggaatggggaaatttagaaagacgtactaaaaataaatatagagataagttgaaaaatatagcgtctattgatttgacagatttaatgaaaatatctttaagaggaaatgaaaaccaattgcaaaaacaaatcgacttttggttgaattaattattataactaaagaactatgttcaatttatgtgcaatcatgcttttttgtccccacgttttgaacatgtttggcaccgccaaaccactcattttttgcaaaattttgcaaaaaaatggggacatgttcacttatgctcatctacttaaaataagtatttttttgttggtttttaaaagtagttgaaatgtttataataatattgaaagatatttctgttttccttttgaataataaacttaaaagagaatataaaataatgcttattaaaattaggggtggaaatatgaaaagagatttttttgaaaagtggtcgtttattttaaatttaattttattttgtgcttttttgtttttagtggttctgatgttttataaggatgtcgatttgatttatattttttgtacattattaatatcattattacctttgctaaatattataaaaagatataagaaaaagacggataattaatccgtctttttttatgaaaagaataggctgggaaataaatcaatcttctatgatctacgaagttatattggcagtaattgactgaacgaaaatgcgcttgtaataagcttttttcaattctagtcaggggccccaacacagagaatttcgaaaagaaattctacaggcaatgcgagttggggcggggccccaacaaagagaaattggattcccaatttctacagacaatgcaagttggggtgggacggcgaaataaattttgcgaaaatatcatttctgtcccactccccagaaaaggttctaccattgtcaaaaaaatgcatctctacatgttagagtaaatattggtcagccaaccaaaataatcaacacgaggagatgctatttaatgtcatctgacacaaacagtttagcacatacgaaatggaattgtaagtaacatattgtctttgcacctaaatacagaagacaagcgatatatggaaaaataaaaaaagatatagggattatattacgtcaattatatgaaagaaaaggtgtagagataattgaagcagaggtatgtaaagatcatatccatatgttagtaagtataccacccaaacttggggtatcatcatttgttggctatttaaaaggaaaagtaatttaatgatatttgatagacatgctaacttaaagtatagatatggaaatagaaagttttggtgtaaaggattttatgtggatacagtaggtagaaataaaaaagtgattgaaaattatattcgtaatcaattacaagaggatatcgttgcagatgaaatctcaatggaagaatatttagatcctttcactggagagaaaaataaaaaaagaaagaaaaaagagtaaacctttaggattgctggaatagtagtgcagttggctgacttgtcagtgcccttttagggctggccagtaaggaaggcttatagccgcagaacaaaccacccgttcacacgggtggtttttatttgtaacatctgttgataggtatcgacaaggaccttttaatgttgtgttttgtgcgatataacaagctttttaggctattaaagaatattcagaattaaatatataattatgaataaattatgtcattgaaaaaattatgattataaaatcattctaaaaacaccgaaataacaatgatttcatgaaaacatttattttaaaatttgatatttgttcaaataatattcgaaattaaacttttttgcatagaattttctttatatcctgagagacatgtactataatgtttgtgaaataattcacaaagtataaaggagtggttgtatatgttaactatacctgaaaaagaaaatcgtggatcgaaagaacaagaagtggcaattatgattgatgctctagctgacaaagggaaaaaagcattagaagcattatctaaaaagtcacaagaagaaattgatcatattgttcatcaaatgagcttagcagctgttgatcaacatatggtgctagcaaaattagcacatgaagaaactggaagaggtatatacgaagataaagcgattaaaaatttatacgcttctgaatatatatggaattcaataaaagacaataagacagtagggattattggtgaagataaagaaaaaggattaacgtatgtagcggaaccaattggtgttatttgtggtgttacgccaacaacaaatcctacgtcgacaactatttttaaagcgatgattgcaattaagacaggaaatccaatcatttttgcattccatccaagtgcacaagaatcgtcgaagcgtgcagcagaagttgtattagaagcggcaatgaaggcaggtgcacctaaagatattattcagtggattgaagtgccttctatcgaagcaacaaaacaattaatgaatcacaaaggtattgcattagttctagcaacaggtggttcgggcatggttaagtctgcatattcaactggcaaaccggcattaggtgtgggaccaggtaacgtgccgtcttacattgaaaaaacagcacacattaaacgtgcagtaaatgatatcattggttcaaaaacatttgataatggtatgatttgtgcttctgaacaagttgtagtcattgataaagaaatttataaagatgttactaatgaatttaaagcacatcaagcatactttgttaaaaaagatgaattacaacgcttagaaaatgcaattatgaatgaacaaaaaacaggtattaagcctgatattgtcggtaaatctgcagttgaaatagctgaattagcaggtatacctgtccccgaaaatacaaaacttatcatagccgaaattagcggtgtaggttcagactatccgttatctcgtgaaaaattatctccagtattagccttagtaaaagcccaatctacaaaacaagcatttcaaatttgtgaagacacactacattttggtggattaggacacacagccgttatccatacagaagatgaaacattacaaaaagattttggactaagaatgaaagcttgtcgtgtacttgtaaatacaccatcagcggttggaggtattggtgatatgtataacgaattgattccgtctttaacattaggttgtggttcgtacggtagaaactcaatttcacataatgttagtgcgacagatttattaaacattaaaacgattgctaaacgacgtaataatactcaaattttcaaggtgcctgctcaaatttattttgaagaaaatgcaatcatgagtctaacaacaatggacaagattgaaaaagtgatgattgtctgtgaccctggtatggtagaattcggttatacaaaaacagttgagaatgtattaagacaaagaacggaacagcctcaaattaaaatatttagcgaagtcgaaccgaacccatcaactaatacagtatataaaggtctggaaatgatggttgatttccaaccggatacaatcattgcacttggtggtggttcagcgatggatgctgcaaaagcaatgtggatgttctttgaacaccctgagacatcattcttcggtgctaaacaaaagttcctagacatcggtaaacgtacttataaaataggcatgcctgaaaatgcgacgttcatttgtatccctacgacatcaggtacaggttcagaagtaacaccatttgcagttatcacagatagtgaaacaaatgtaaaatatccgttggctgattttgctttaacacctgacgttgcaattattgaccctcaatttgtgatgagtgtgccaaaaagcgttacagcagatacaggaatggatgtactaacgcatgcaatggaatcatatgtatctgtaatggcttcagactacacaagaggtttgagtctacaagcgattaaattgacgttcgaatatttaaaatcatctgttgaaaagggtgataaagtttcaagagagaaaatgcataacgcatcaactttggctggtatggcatttgcaaatgcattcttaggcattgcacactcaattgcgcataaaattggtggcgaatatggtattccgcatggtagagcgaatgcgatattactaccgcatattatccgttataatgccaaagacccgcaaaaacatgcgttattccctaaatatgagttcttcagagcagatacagattatgcagatattgccaaattcttaggattaaaaggtaatacgacagaagcacttgtagaatcattagctaaagctgtctacgaattaggtcaatcagtcggaattgaaatgaatttgaaatcacaaggtgtgtctgaagaagaattaaatgagtcaattgatagaatggcagagctcgcatttgaagatcaatgtacaactgctaatcctaaagaagcactaatcagtgaaatcaaagatatcattcaaacatcatatgattataagcaataatctatctgataataatcatctaactcacctgaaattacaaaagtaaaaaatgccacataaactttaagtcgataatcattatacggttatcggcttttatttattgccaaatcttcagagagatacaaactagacaatcatttttttaaataaagaaaatattaagattgatactcatttcacaaactattactactttagagtataattatttttaatttcatataaatgaaaagtagaaaataatgcggtttaaaagtaattaattgtttaaacgatatgtaaatactatatatataataccaattttaatgaaaatttttaagggaggtaaataatggaaagtacattagaattaacaaaaattaaagaagtattacaaaaaaacttgaagattttaattattttaccgctattatttttaattattagcgctattgttacatttttcgtcttatcacctaaatatcaagctaatactcaaatcttagtgaatcaaactaagggtgacaatcctcagtttatggcacaagaggttcaaagtaatattcaacttgtaaatacgtataaagaaattgttaaaagtcctagaattttagatgaggtgtcaaaggacttaaatgataagtattcaccatctaaattgtcgagtatgttgacaattacaaaccaagaaaatacgcaacttatcaacatccaagttaaaagtggtcataaacaagattcggaaaaaattgcgaatagcttcgctaaagttacaagtaaacaaattccgaagattatgagtgtggataacgtatcaattttatctaaagcagacggtacagcagttaaagtcgcaccaaaaactgtagtgaatctaatcggtgcattctttttaggattagttgtcgcgcttatatatatcttcttcaaagtaattttcgataagcgaattaaagatgaagaagatgtagagaaagaattaggattgcctgtattgggttcaattcaaaaatttaattaaggatggttgctacttatgtcaaaaaaggaaaatacgacaacaacactatttgtgtatgaaaaaccaaaatcaacaattagtgaaaagtttcgaggtatacgttcaaacatcatgttttcaaaagcaaatggtgaagtaaagcgcttattggttacttctgaaaagcctggtgcaggtaaaagtacagttgtatcgaatgtagcgattacttatgcacaagcaggctataagacattagttattgatggcgatatgcgtaagccaacacaaaactatatttttaatgagcaaaataataatggactatcaagcttaatcattggtcgaacgactatgtcagaagcaattacgtcgacagaaattgaaaatttagatttgctaacagctggccctgtacctccaaatccatctgagttaatagcttcagaaaggtttaaagaattagttgatctgtttaataaacgttacgacattattattgtcgatacaccgccagttaatactgtgactgatgcacaactatatgcgcgtgctattaaagatagtttgttagtaattgatagtgaaaaaaatgataaaaatgaagttaaaaaagcaaaagcacttatggaaaaagcaggcagtaacattctaggtgtcattttgaacaagacaaaggtcgataaatcttctagttattatcactattatggagatgaataagtatgattgatattcataaccatatattgcctaatatcgatgacggtccgacaaatgaaacagagatgctggatcttttaaaacaagcgacaacacaaggtgttacagaaatcattgtaacatcacatcacttacatcctcgatataccacacctatagaaaaagtgaaatcatgtttaaaccatattgaaagcttagaggaagtacaagcactaaatctaaagttttattatggtcaggaaataagaattaccgatcaaatccttaatgatattgatcgaaaagttattaccggtattaatgattcacgctatttactaatagaatttccatcaaatgaagttccacactatactgatcaattatttttcgaattacagagtaaaggctttgtaccgattattgcacatccagagcggaataaagcaataagtcaaaaccttgacatactatacgatttaattaacaaaggtgctttaagtcaagtgacaacggcgtcattagcgggtatttccggtagaaaaattagaaaattagcaattcaaatgattgaaaacaatctgacacatttcatcggttcagatgcgcataacacagaaatcagaccgttcttaatgaaagacttatttaatgataagaaattacgtgattattatgaagatatgaacggatttattagtaatgcgaagttagttgttgatgataaaaaaattcctaaacgaatgccacaacaagattataaacagaaaagatggtttgggttataaacagcaaatgaggggttttatggcacatttatctgtgaaattgcggcttttaatactagcattaatcgattcactgatagtgacattttcagtattcgtaagttattacattttagaaccgtatttcaaaacatattctgtcaaattattaatattggcagctatatcactattcatatcgcatcatatttcagcatttatttttaatatgtatcatcgagcgtgggaatatgccagtgtgagtgaattgattttaattgttaaagctgtgacgacatctatcgttattacgatggtggtcgtgacaattgttacaggcaatagaccgttttttagattgtatttaattacttggatgatgcacttgattttaataggtggctcaaggttattttggcgtatttatcggaaataccttggaggtaagtcatttaataagaagccaactttagttgttggtgctggtcaagcaggttcaatgctgattagacaaatgttgaaaagtgacgaaatgaaacttgaaccggtattagcagtcgatgatgacgaacataaacgcaatatcacaattactgagggtgtaaaagtccaaggtaaaattgcggatattccagaactagtgaggaaatataagattaaaaaaatcatcattgcaattccaactattggtcaagagcgtttgaaagaaattaataatatttgccatatggatggcgttgagttattgaaaatgccaaatatagaagacgtcatgtctggtgagttagaagtgaaccaacttaaaaaagttgaagtagaagatttactaggcagagatcctgttgaattagatatggatatgatatcaaatgaattgacgaataaaactattttagttacgggtgcaggtggttcaataggatcagaaatttgtagacaagtttgtaatttctatccagaacgtattattctacttggccatggtgaaaacagtatttatttaatcaatcgtgaattgcgaaatcgcttcggaaaaaatgttgatatcgttcctattatagcggatgtgcaaaatagagcgcgtatgtttgaaattatggaaacgtataaaccatacgcagtttatcatgcagcagcacacaagcacgtgccgttaatggaagagaaccctgaagaagcagtacgtaataatattttaggtacgaaaaatactgctgaagctgctaaaaatgcagaggtgaagaaattcgttatgatttctacggataaagccgttaatccgcctaatgtcatgggagcttcaaagcgaattgcagaaatgattattcaaagtttaaatgatgaaacgcatcgaacaaattttgttgcagtgagatttggtaatgtacttggatcgagaggatctgtgattccacttttcaaaagtcaaattgaagaaggtgggccagttactgtgacacatcctgaaatgacacgttactttatgacaattcctgaagcttctagactagttttgcaggcaggggcattagcagaaggtggcgaagtatttgtgctagatatgggagaaccagtgaaaattgtagatttggcacgtaatttaattaagctaagtggtaaaaaagaagacgacatacgcattacttatacagggattagacccggcgaaaaaatgtttgaagagcttatgaataaagatgaggttcatcctgaacaagtatttgaaaaaatttatcgtggcaaagtacaacatatgaaatgtaatgaagttgaagcgattattcaagacatcgtcaatgactttagtaaagaaaaaattattaactatgccaatggcaaaaagggagataattatgttcgatgacaaaattttattaattactgggggcacaggatcattcggtaatgctgttatgaaacggtttttagattctaatattaaagaaattcgtattttttcacgcgatgagaaaaaacaagatgacattcgaaaaaaatataataattcaaaattaaagttctacattggtgatgtgcgtgatagtcaaagtgtagaaacagcaatgcgagatgttgattatgtattccatgcagcagctttaaaacaagtgccgtcatgtgaattctttccagttgaggcagtgaagacaaatattattggtacagaaaatgtcttacaaagtgctattcatcaaaatgttaaaaaagtcatatgtttatctacagataaggcagcgtatcctattaatgctatgggtatttcaaaagcaatgatggaaaaagtattcgtagccaaatcaagaaatattcgtagtgaacaaacgctgatttgtggtacaagatacggtaatgtgatggcttcaagaggatcagtaattcctttgtttatcgacaaaatcaaagctggagaacctttaacgattacagatcctgatatgacaagatttttaatgagtttagaagatgccgtagaactagttgttcatgcatttaagcatgcagaaacaggcgatattatggttcaaaaagcaccaagctcaacggtaggggatcttgcgaccgcattattagaattgtttgaagctgataatgcaattgaaatcattggtacacgacatggagagaaaaaagcagaaacattgttgacgagagaagaatacgcacaatgtgaagatatgggtgattattttagagtgccggcagactccagagatttaaattatagtaattatgttgaaaccggtaacgaaaagattacgcaatcttatgaatataactccgataatacacatattttaacggtggaagagataaaagaaaaacttttaacactagaatatgttagaaacgaattgaatgattataaagcttcaatgagataggagagattgacgttgaatattgtaattacaggagcaaaaggttttgtaggaaaaaacttgaaagcagatttaacatcaacgacagatcatcatattttcgaagtacatcgacaaactaaagaggaagaattagagtcagcattgttgaaagcagactttgtcgtgcatttagcgggtgttaatcgacctgaacatgacaaagaattcagcttaggaaacgtgagttatttagatcatgtacttgatatattaactagaaatacgaaaaagccagcgatattattatcgtcttcaatacaagcaacacaagataatccttatggtgagagtaagttgcaaggggaacagctattaagagagtatgccgaagagtatggcaatacggtttatatttatcgctggccaaatttattcggcaagtggtgtaagccgaattataactcagtgatagcaacattttgttacaaaattgcacgtaacgaagagattcaagttaatgatcggaatgttgaactaacgctaaactacgtggatgatatcgtcgctgaaataaagcgtgctattgaaggaactccaacgattgaaaatggtgtacctacagtaccaaacgtatttaaagtgacattgggagaaattgtagatttattatacaagttcaaacagtcacgtctcgatcgaacattgccgaaattagataacttgtttgaaaaagatttgtatagtacgtatttaagctatctacctagtacagactttagttatcccttacttatgaatgtggatgataggggttcttttacagaatttataaaaacaccggatcgtggtcaagtttctgtaaatatttctaagccaggtattactaaaggtaatcactggcatcatactaaaaacgaaaaatttctagtcgtatcaggtaaaggggtaattcgttttagacatgttaatgatgatgaaatcattgagtattacgtttctggcgacaaattagaagttgtagacataccagtaggatacacacataatattgaaaatttaggtgacacagatatggtaactattatgtgggtgaatgaaatgtttgatccaaatcagccagatacgtatttcttggaggtatagcgcatggaaaaactaaaattaatgacaatagttggtacaaggcctgaaatcattcgtttatcatcaacgattaaagcatgtgatcaatattttaatcagatattagtacacactggtcaaaattatgattatacattgaatcaaattttctttgatgatttggaattgagacaaccggaccactacttagaggcagttggaagtaaccttggagaaacgatggggaatattattgcgaagacatatgacgttttattacgcgaacaaccagatgcacttttaattcttggtgatacaaatagttgtttagcagcagtatctgctaaacgattaaagattcctgtgttccacatggaagcgggtaatagatgctttgatcagaatgtacctgaagaaatcaatcgtaaaattgttgaccatgtcagtgatgtgaatctaccttatacggaacatagcagacgttatttattagatgaaggcttcaataaagcgaatatctttgtgacaggatcaccgatgacagaagtgatagaagcgcatcgagataaaattaatcacagtgacgttttaaataaactaggattagaaccgcaacaatacattttagtatctgcgcatagagaagagaatatcgataatgaaaagaattttaaatcattaatgaatgcgataaatgatattgccaaaaagtataaaatgcctgtgatttattcaacgcatccaagaagttggaagaaaattgaagaaagtaaatttgaatttgatccattagttaaaaagttaaagccatttggtttctttgattataatgcattgcaaaaagatgcatttgttgtgctatcagatagtggaacattgtcagaagagtcgtctattttgaagttccctggtgtccttattcgaacttccacagaaagaccggaagtactagataaaggtacggttattgtaggtggtattacctataacaatctaatccaatccgttgaactagcaagagagatgcaaaacaataacgaaccgatgattgatgctattgattataaagacactaacgtttcgacaaaggtagttaaaattattcaaagctataaagatattatcaatcgaaatacttggaggaaatgacgatgaggatagcgattcttggcgctactaacattaagcatatgtcattattatcacattatttaaaccacattgatttgaatatcaatgaggtggacattatatacactgacaaatatgatatcgaagaacatatccaaggcatcaataattactataaatataaagtagatattaaagaagattggacatttatcaaaaaagctattgcttactatcgatttaggccatacgctatgaaaattcttaaagaaaatcgttatgattttgtcatagtatggggaagttatacaggacacttatttaaaagttttttagaaaaacactataaaaataaattcattttaaatataagggactacttttttgaaaataataaacttattaagtatagaatgaaaaaaatcgttgatgctagcagggtgacaacattatcttcagaaggttttcttaaatttttacctaaatctgaaaaatatagaattatttatagttataacatgagtattattagagaaagtaatgtaaccgatgggtttaaaaaaagatggccaattaatataggttttattggtaatgttagatttaatgagataaatcaaaaattgataaaggaactggcaaatgattcaaggttccatatgcaatattttggaacagggtcggaaaaattagaagtctttgctcgagaaaattttattaataatattacattttctggcggctttgacttgaaagaaacaccgaaatatttaaatgaaattgatatacttaataatttgtttggtaatcaaaatattgctttagatactgctttatccataagaatgtattatgcgttgtttttaaacaaacctattattacaacagacgatacattcaccgctacagaagctaataaattcggactgggttttagtattaatccagaaaatttaaaaggtattggtgatgaattgatggattggtataacaatttggatgtaatggacattaatcataaaagagaagcttatagaaacgatgtaattgaaaataataaacagttctatcaagagataggcaggatatttaatgaataagatatataatgtcacttcatatgttattgccattttaatgtttccttgccttatgttaggtgataaacctttattatttttagcacctataagttatggagtaggaaagctctttataagcttctcgaataatccgaattttaaattttcgaaaattgtatacgatgttttaggttttcttagattagtatttatacctgctatgatagtgtttttccaggattcaactatagataatttaccattaggacaagcttattttaatcaagcggttatttatatgagtgtggagtttatcataggctcgctatttatattgatactatctaaattattcaaacatgaagtggtatcaagaaatagctttacactttctggatcatcaatttattacattgtgtttggtcttgttatttgtgggatttttgtagcttttcccgaagtgcgcaaaaacatatcatttttaattattaaaacagatgcaatgggaagaggaaccgaagcaacaagtggtttaaatgttctttttgtaatgctatttcaacttgccttagcgttattattcttaataatcgcatatgcttcatataaaaagtataaagagaatcctaaaattatttatgttgtattaccgctagctataggaattttaaatattagtttaattgttggtgaaagaagaagttatcaactttatacaatggttgctgttttaacagtggtgtcaatcttgttttctaagcataaaagacgtatcaatatcattattatatctgtaggtattttcgtattagcattgatgacactatataaagaattgtatgtgtttaattatagttcatatagcgaggcgttaaatagtacaagtgtaagtaatcttaaaatagttgacacgttgcagtcatatttttatggacctagcaatattgcagcttctatagactatttgaattactataatggttcgttcaaacaatatttatttgataataccagagctgtttttgggtttaatttctttttagataaaaagcagttgattactagccaactttttaaccaattgatatatggtagtaaacaattgactggtcatctaatttcgagtgctggatatggaattatttattttggacccttattcttctatttgaatttaattgcaaatatcttttttgcatttctgagtgagtatattattcggaagagtcattcgttagaagtgatatttattggtacatatatttatatgagacttattacgagtatttttagtcacccgacaccattaatcacattgatttctatgattttagttgtatatgttatagctattatcccaggcattataataaaaaaatttactaaaaaagtagggatagaatgattgtaaaaacatttatgaaatcgaaaatatttagattaatgaatacaccactattattattttataagaaagaatatttaactggatattattttgaaaataaagtggctggatggttatgggcgtggaaagctgttccgttcaagttgttaggaataaatacaagtttgccatttcctgcagatataactgttagaatgcataaccctaataacattgtttttgataaaaatgatattcatatttttcaatcgcccgggacgtattttaataatttttcagcagttatatatataggtagaggtgtttatatagcgcctaacgtaggtattattacagctaatcataatattaaaaatttgaagtcacatgcaccaggtgaagatgtcaaaatagggaattatagttggattggaatgaactcagttatattaccaggagtagaattgggggaacatacaattgtaggggctgggtcggttgtaacaaaaagttttccagaaggtaacgttgttataggtggcaatccagcgaaaatcatcaagaaaatctgaggttaattatgagattaaataaatttattggcgattcgtttttaatgattttaagcagtggcatcgctcaagtcatattaatcatcactaccccaattattacaagactatattcacctacagaatttggtgagtttacaattttttcaaatatcgcaatgattttaataccaataataaatgcaagatacgatttgttgattgtgaataccaaaaatgaccgtagtgctaatatactttcacaaatcagttttttgatatcattgcttattttattaatactgataccaatatttgcgattagtgcatgtttatacccaaactttatattagattttattttcattattattatgttgtttttggtaagtttaacaaacatttttacaaattatctaaataaggaaagaaagtataaagtgttaagtttgattaatgtgtttagagctggatcaatggctttacttcaaatcattttcggacttttagcattaggaagtttaggattaattattggtttttcattatcctatatcgcaggcattacactaggatataaaacgtttaaaaagcactttaatattgtgagagataaagaagaaactaaagcattatttttagaaaataaaaatcagttagtttattcaacaccatcaatattattaaatagtttgtctttctcggttgttgtgttctttataggtattttgtataccaatacagaagtgggtatttatggtatggccataagagtactaggcataccagtgacaattatttcattagggttatcaaaaatatttatgcaacaagccaatgactattatattgaacatggtaacttccgaaatttattacttaaatttagttccatactggttatagtttctataattctttatgtgccactttatttgttcagtgaagaattagtcaatatattattaggacatagctgggttgacgcaattacagttataaaaattgttatcccattatttgttataaggctgattgtatcaacggtatcactttctgtgattgtattacaaaaacaacagttagaattaatactacaagcgttatttttaataggtactactgcaacatttgttatatcaaaaatgcttaatttaacttttttaaactttgtatctattaatacaattgttttaatcgtatcgtacatgatatttttcatagcactctattattttgctaaaaataaacagttcaaaaattcttagtctaaattcattaataaaaaggacgtcgattagatgagtgaaaaaaagattttgattttatgtcagtatttttatccggaatatgtatcttctgcgacgttaccaactcaattggcggaagatttaattgcgaatcacattaatgtcgatgtcatgtgtggatggccatatgaatatagtaatcataaacaggtttctaaaaccgagatgcatcgtggtatttgcattcgacgtctcaagtattcgaggtttaataacaaaagtaaggttggaaggatcatcaatttctttagtttattttcaaaattcgtgattaatatacctaaaatgttgaaatatgatcagattcttgtttactctaatccaccaatcttgccattaataccagacgttttacacagactgcttaagaaaaaatattcttttgtggtgtatgatatagcacctgataatgcgattaagacaggtgcaactcgtccaggtagcatgattgataaactgatgcgttacattaatagacatgtctacaagaatgctgaaaatgtcattgtccttggtacggaaatgaaaaactacttactaaatcatcaaatttctaaaaatgctgacaatatccatgtgattcctaactggtatgacatgcgtcaattacaagacaatcgtatctataatgacacatttaaagcttaccgtgagcaatacgacaaaattttattgtatagcggtaatatggggcagttacaggatatggagacacttatctcatttttaaaattaaataaggatcagcctcaaacgttaacaatactttgtggtcatggtaagaaatttgcagatgtcaaaacggcaatagaagaccatcgtattgaaaatgttaaaatgtttgagtttttaacaggtacagactatgctgacgtattaaaaattgcggatgtatgtattgcatcgctgattaaagaaggcgtcggtttaggcgtgccgagcaagaattatggctatcttgcagctaagaaagcgttggtactcatcatggataagcaatctgatatcgttcaacatgttgaacaatatgatgcgggtatccaaattgataatggcgatgcacatgccatttataacttcatcaacactcactcgagtaaggaattgcacgagatgggtgagcgcgcacatcaactgtttaaagataaatatacgagagaaattaatactatgaagtattacaatctgttgaagtgaggagataattatgaagcgattattcgatgtagtgagttcaatatatggtttagtagttttaagtccgattctgttaattacagcattactaattaaaatggaatcacctggaccagccattttcaaacaaaaaagaccgacgattaataatgaattgtttaatatttataagtttagatcaatgaaaatagacacacctaatgttgcaactgatttaatggattcaacatcgtatataacaaagacagggaaggtcattcgtaagacctctattgatgaattgccacaattattgaatgttttaaaaggagaaatgtcaattgtaggtcctagaccagcgctttataatcaatacgaattaatcgaaaaacgtacaaaagtgaacgtgcatacgattagaccaggtgtgacaggactagctcaagtgatggggagagatgatatcactgatgatcaaaaagtagcgtatgatcattattacttaacacatcaatctatgatgcttgatatgtatatcatatataaaacaattaaaaatatcgttacttcagaaggtgtgcatcactaatgagaaaaaatattttaattacaggcgtacatggatatatcggtaatgctttaaaagataagcttattgaacaaggacatcaagtagatcaaattaatgttaggaatcaattatggaagtcgacctcgttcaaagattatgatgttttaattcatacagcagctttggttcacaacaattcacctcaagcaaggctatctgattatatgcaagtgaatatgttgctgacgaaacaattggcacaaaaggctaaatctgaagacgttaaacaatttatttttatgagtactatggcagtttatggaaaagaaggtcaggttggtaaatcagatcaaattgatacacaaacaccaatgaaccctacgaccaactatggtatttccaaaaagttcgctgaacaagcattacaagagttgattagtgattcgtttaaagtagcaattgtgagaccaccaatgatttatggtgcacattgcccaggaaatttccaacggttaatgcaattgtcaaagcgactgccaatcattcccaatattaacaatcagcgcagtgcattatatattaaacatctgacagcatttattgatcaattaatatcattagaagtgacaggcgtgtatcatcctcaagatagcttttactttgatacatcgtcagtaatgtatgaaatacgtcgccaatcacatcgtaaaacggtattgatcaacatgccttcagtgttaaataagtattttaataagttgtcggtctttagaaaattattcggcaatttaatatacagcaatacgttatatgaaaataataatgcacttgaagttattcctggaaaaatgtcacttgttattgcggacatcatggatgaaacgacaaccaaagataaggcataagtcatctattaaataaaatcaacatacaaatcgttttatttggaggttatagtatgaagttaacagtagttggcttaggttatattggtttaccaacatcaattatgtttgcaaagcatggcgtcgatgtgcttggtgttgatattaatcagcaaacgattgataagttacaaagtggtcaaattagtattgaagaacctggattacaagagatttatgaagaggtactgtcatcgggaaaattgaaggtatctacaacgccagaagcatctgatgtttttatcattgccgttccgacgccgaataatgatgatcagtaccggtcatgtgacatttcgctagttatgcgtgcattagatagtattttaccatttttaaaaaaagggaatactattattgtagagtcgacaattgcgcctaaaacgatggatgattttgtaaaaccagtcattgaaaatttagggtttacaataggtgaagatatttatttagtgcattgtccagaacgtgtactgccaggaaaaattttagaagaattagttcataacaatcgcatcattggcggtgtgactaaagcttgtattgaagcgggtaaacgtgtctatcgcacatttgttcagggagaaatgattgaaacagatgcacgtactgctgaaatgagtaagctaatggaaaacacatatagagacgtgaacattgctttagctaatgaattaacaaaaatttgcaacaacttaaatattaatgtattagatgtgattgaaatggcaaacaaacatccgcgtgttaatatccatcaacctggtccaggtgtaggcggtcattgtttagctgttgatccgtactttattattgctaaagaccctgaaaatgcaaagttaattcaaactggacgtgaaattaataattcaatgccggcctatgttgttgatacaacgaagcaaatcatcaaagcattgagcgggaataaagtcacagtatttggtttaacttataaaggtgatgttgatgatataagagaatcgccagcatttgatatttatgagctattaaatcaagaaccagacatagaagtatgtgcttatgatccacatgttgaattagattttgtggaacatgatatgtcacatgctgtcaaagacgcatcgctagtattgattttaagtgaccactcagaatttaaaaatttatcggacagtcattttgataaaatgaagcataaagtgatttttgatacaaaaaatgttgtgaaatcatcatttgaagatgtatcgtattataattatggcaatatatttaattttatcgacaaataaaatgtgtcaaactagggcatacatgattaaggaaagataagctgtcatgtgtttgaacttcagagaggataatgttatgaaaaaaattatggttattttcggtacgagacccgaagcaataaaaatggcaccattagtaaaagaaattgatcataatgggaactttgaagcgaacattgtgattacagcacaacatagagatatgttagatagtgtgttaagtatatttgatattcaagctgatcatgatttaaatattatgcaagatcaacaaacgttagcggaccttacggctaatgcgcttgctaaacttgatagcatcattaatgaggaacagccggatatgattttagtacatggtgatactacaacgacttttgtaggaagtttggcagcattttatcatcaaattccggtcggacatgtagaagctggacttcgaacacatcagaaatactcaccatttcctgaagagttaaatcgagtcatggtaagtaatattgctgaattgaattttgcgccaacagtaattgcagctaaaaatttactttttgaaaacaaagacaaagagcgtatctttattactggaaatacagttattgacgcattgtcaacaacagttcaaaatgattttgtttcaacgattattaataaacataaaggcaagaaagttattttactaacagcgcatcgtcgtgaaaatattggggaaccgatgcatcagatttttaaagcagtaagagatttggcagatgaatataaagatgttgtcttcatttatccaatgcatcgtaatccaaaggtaagagcgattgccgaaaaatatttatctgggagaaatcggattgaattaattgagccattagatgcgattgagttccataattttacaaatcaatcgtacctcgtgctgacagattctggtggtattcaagaggaggctcctacatttggaaaacctgtgttggtattaaggaatcatacagagcgtcccgaaggcgttgaggcgggaacatcgagagtaattggcacagattatgacaatattgttcgaaatgtgaaacaattgattgaggatgatgaagcatatcaacgtatgagtcaagcgaataatccatatggtgatggacaagcatcacgacgtatttgtgaagcaatagaatattattttggattgcgcacagacaagccggatgaattcgtacctttacgtcacaaataataaaaaacccctaatcatgaagttggtttagacaaccagcggtgactaggggtttttaatatatttatttttgatagtggtagccaatatcatatttgaatactttatttgataatattggactttgctgtccatcgtcatcactttttaaacgtacatttttatgagcttctttaaatacatcggaattcaaccaattattaaagctatcttcagattcccaaatagttaagattttaacttcgtctgtatcctcagtatttaatgttttagtgacaaacatttgttggaagccttcaatagtttcaatgccttgtctattgtaaaaacgttcaatcgtttcttccgcactgcctttttgtaattgtaatctattttctgccataaacatgggcaatcactcctctattttatgatttgatttgggtaatgtttttacaaatgtaaagagtacagcggtttgtatgataaccattatgattaatcctatacgtactgcaagaacatccaccatataaattgaaaaacctattacaatgtataagctaattaaaattttaattttctgttgtagcgtgtagcctcgatgtaaataaaagttttctacatattctttataaattttttgattaataagccaattgtaaaagcgatctgaacttcgagcaaaacaaaaaactgctacgagtaaaaaaggggtcgttggcagtaaaggtaatacggcacctgcaataccaagcgctgtaaatattaagccaatgacgattaaaataagtcgcattgaaaaaactccattctagtactaatgcgcatgtaatattgttttagtaatataactcatgctaaatataatgtgtatgataagtgcaatgactcagtaaaatgaaacgatgttgaattatccttgtcacattaacgcattttaagcgcgactttcataacaaccaaactatttaatgagaattattctcaagtattatagttatattatgtgttttatttttgaaaagtgcaatatgttttcgaaaataagattatttttatgtgcaaaaacgacgcaaaagttttaaaaatgagacttctgtgagctgattattttataaaatgtaaacgcttactatataatgtgaatcatatcgtttaaaagcattattaaatatgatgctaagagatttatattatagccaataaacaaaggagagataatatggcagtaaacgttcgagattatatagcagagaattatggtttatttatcaatggggaatttgttaaaggtagcagtgacgaaacaatcgaagtgactaatccagcaactggagaaacactatcacatattacaagagcaaaagataaagatgtcgatcatgcagtcaaagtggcgcaagatgcatttgaatcatggtcattaacttctaaatcagaacgtgcacaaatgttgcgtgatattggtgataaattaatggcacaaaaagataaaattgcaatgattgaaacattaaataatggtaaaccgattcgtgagacaacagcaattgatattccatttgctgcaagacatttccattatttcgcaagtgttattgaaacagaagaaggtacagtaaatgatatcgataaagacacaatgagtatcgtacgacatgagccgattggcgtcgtaggtgctgttgttgcttggaacttcccaatgctattagctgcatggaagattgcgccagccattgctgcaggtaatacaattgtgattcaaccttcgtcttcaacaccattaagtttattggaagttgctaaaattttccaagaggtattacctaaaggtgttgtcaatatactaacgggtaaaggttcagaatcaggtaatgcaattttcaatcatgatggtgtagataaattatcatttacgggctcaactgatgtaggttatcaagttgccgaagctgcagcaaaacatctagtacccgctacattagagcttggtggtaaaagcgccaatatcatattagatgatgctaatttagaccttgcagttgaaggtattcagttaggtattttattcaaccaaggtgaagtatgtagtgcaggttctcgattattagttcatgaaaaaatttatgatcaattggtgccacgtttacaagaggcattttcaaatattaaagttggagatccacaagatgaagctacacaaatgggtagtcaaactggtaaggatcaattagataaaattcaatcatatattgatgcagcaaaagaatcagatgcacaaattttagcaggtggtcatcgcttaactgaaaatggattagataaagggttcttctttgagccgacattaattgctgtgccagacaatcatcacaaattagcacaagaagaaatatttggaccagtgttaacagtgattaaagtgaaggacgatcaagaagcaattgatatagctaatgattctgagtatggtttagcaggcggtgtattttctcaaaatatcacacgtgcattaaatattgctaaagctgtacgtacaggacgtatttggattaacacttacaaccaagtaccagaaggcgcaccatttggtggttataaaaaatcaggtatcggtcgagaaacttataaaggtgcgttaagtaactatcaacaagttaaaaatatttatattgatacaagcaatgctttaaaaggtttgtactagaataaatatcgtttctgaagcgtgtttgtaggtcagtctagcggtaagtcttaacatttaacggcgttgtttagattttaagcaaaacaaaatatataggaacacgtatcatgatattaggatataatgactaaaataatagcagtaggatggtttttaattgcaaatcatcttactgctgtttttaattatgctaatttgcgatgcggctattataaggacagagttgtttattaattatggtgatttagaaatatgaagttcaatatgcaaagtcatcgtttgttttaatatgcggaacaatcattaaagttattgcgattttttgaacttaatgaaactaaacaataaatttgagatacttttttgtcatttttatgtaactaacacaataatctcgtacattattaaaattttctatatgataggaataaagcaaagagcgagtgtgctgtaaaagttttccaaggtgatattacataaagctataaagggtaaagattaatgagttgtcatgtaaatgacgatgatgtataaatcatggttaattacggaagcattaatattaacctgagaagctataaagaattatttttaaaagcgacaatattaaatacgacgcatttatttaggagtggcaaacgtatgaatgggaaaaaggcgaatacgataaacagatacaaatattttcatcatgtcaatcatcaaaaaattcaacaaagttctaaaaagacgctgtgggcatcacttatcatcacattgttatttacagtgattgaatttgtcggaggtttagtatctaattcattggcattactgtcagattcatttcatatgcttagtgatgtattagcacttggtttatctatgttggccatttattttgcaagtaaaaagccgactgcacgatacacatttggatatttaagatttgagatattagctgcatttttaaatggtttagcattaattgtaatttcaatctggattttatatgaagctattgtacgtattatttatccgcaaccaattgaaagtggcattatgtttatgattgctagtattggtttactcgttaatattattttgacaattatccttgtaaggtctttaaaacaagaagacaatatcaatattcaaagtgcattatggcatttcatgggagacttattgaactctattggtgtcatcgttgcagttgtattgatttactttacaggatggcgcatcatcgacccaatcattagtattgtaatttcactcatcattttacgtggtggttataaaattacgcgtaatgcgtggttaattttaatggaaagtgtgcctcaacatttggatactgatcaaattatggcagatattaaaaacatagatggcatattagatgtacatgaatttcatttgtggagtattacaacagagcattattcattaagtgcccatgttgtgttagataaaaaatatgagggtgatgattatcaagcgattgatcaagtatcatcattgttgaaagaaaaatatggcattgcacattcaacgttgcaaattgaaaacttgcaattgaatccattagatgagccatacttcgacaaattaacataaataaaacattgtacaggctgggacataaatcaatgttctatgctctacgaagttatattggcagtagttgactgaacgaaaatgcgcttgtaacaagcttttttcaattctagtcaggggccccaacacagagaatttcgaaaagaaattctacaggcaatgcaagttggggtgtgggccccaacacagagaatttcgaaaagaaattctacaggcaatgcaagttggggtgggacaacgaaataaattttgcgaaaatatcatttctgtcccactcccacgtttgttttggattatgttgcatcatttaaatgattttcgtcaatttctttgatgctatctacatctaacacgacatctttaggtttcaaaatatgaatatgtttttcatcatttgtatgtaaaatgcgttctatgatgtatctttgaccggccattgtttctacagcaatctttttgtttctagctaaacttgctacgacagattctttatccataatgatagccccctatatatatgtttatttacttataccctaacatgatttttatactctttgaaaatatattttacaggattttatctaaatattaaaaaaatcgctcaatatccttgtaatccgataagaattatagtaatattttttcaaccattgttataggaggtcttattaatgacattatttttattagaagctaacaatcttgattttgcatcaacgaaagaagaactagaagcaaaggcagcatcactatctacgaagacaattccaacattaattgaagtacaagctactgaaaatttaactcatggttattttattgtggaagcaaatgacgaagcagaagctaaacaatttttaacagaagcagatattagtattcaattagtcaaagaagtacgcttagttggtaaagatttagatgaagttaaaaatggtgatgcacatgttgattaccttgtaacttggaacattccggaaggcattacgatggatcaatatttagcacgtaaaaagaaaaattctgttcattatgaagaagtgccagaagttgaatttaaacgcacatatgtatgtgaagatatgtctaaatgtatttgtttatacaacgcacctgatgaagaagcggtacgtcgcgcgcgcaaagcagttgatacaccgattgatggcatcgaaaaactttaataagacaacaagttgatgagatatatgtatataggtttgacgtggatttctattgcagttaattagaatagctcaatgctataaatgtaagtagttaatatgacgaaactaatgaactaaatgcaagtattgtctaaaacaatcattttattgaaatttagtagagctgaaattaatataacgtcgttaattgaataacgcttatgttataagagcactcataccaaaccataatcatctatagatataacaattcacgatataagggctgtgtttggcatagccctttagatatacacttaattcctattaaaatagtagggattaaaagggggcttgtcatgattaaaatacaacaattacaacatcactttggatcacataaagtaattcataactttaatttggacattagcaaaggagaaatagtcactttcataggaaaaagtggttgcggaaagtctactttactcaatatcatcggtggatttattcatccatcatctggacgtgtcattattgataacgaaattaaacaacagccgtctccagattgtttaatgctatttcaacatcataatttgctgccatggaaaacgattaatgacaacattaggattggatttcgacagaaaattagtgatgaagagattaacgcacagcttaaattagttgatttagaaggcaggggaaagcattttcccgagcaactgtccgggggtatgaaacaacgtgtggcactatgtcgagcgcatgtgcataagcctaacgttatattgatggatgagccattaggtgcattagatgcatttacacgttataaacttcaggatcaactagtgcaactaaaacataaaacgcaatcaactattattttagtgacgcatgacattgatgaagctatttatctttccgaccgcattgttctgttaggtgaagggtgcaatattatttctcaatatgaaattacagcatcacatccacgcagtcgtaatgatagccacctacttaaggttcgtaatgaaattatggaaacatttgcattgaatcatcatcaagttgaacctgaatattatttataaggagtgagtgacgatgaaaaggttaagcataatcgtcatcattggaatctttataattacaggatgtgattggcaaaggacgtctaaagaaccgtctaaaaatgcccaaaatcagcaagtgattaaaattggatatttgccgattacacattcagctaatttgatgatgactaaaaaattattatcacaatacaatcatccgaaatataaactagaattagttaaattcaataattggccagatttaatggacgcattaaacagtggtcgtattgatggtgcatcaactttaatagagctagcgatgaaatcaaaacagaagggctcaaatataaaggctgtggcattgggccatcatgaaggcaatgtcattatgggacaaaaaggtatgcacttaaatgaatttaataataatggcgatgattaccattttggtataccacatcgttattcaacacattatcttttacttgaggaattacgtaaacaattaaagattaaaccggggcattttagctatcatgaaatgtcgccagcagaaatgccagccgcattgagtgaacacagaattacagggtattctgtagccgaaccattcggtgcactgggtgaaaagttaggcaaaggtaagactttgaaacatggtgatgacgttatacctgatgcgtattgctgtgtgctagtactgagaggggaattgcttgatcaacacaaggatgtagcgcaagcatttgtacaagattataaaaagtctggctttaaaatgaatgatcgcaagcaaagtgtagacattatgacgcatcattttaaacaaagtcgtgacgttttaacacagtcagcggcatggacatcctatggtgatttaacaattaagccatccggctatcaagaaattacgacattggtaaaacaacatcatttgtttaatccacctgcatatgatgactttgttgaaccgtcattgtataaggaggcatcgcgttcatgacacgtcccacaaataacaaatttatattacctattatcacatttattattttcttaggcatttgggaaatggtcattattattgggcattaccaacctgtattgttacctggtcctgctcttgtaggaaaaagtatatggactttcattgttactggagaaattttccaacatttagcaattagtttatggagatttgtagcgggctttgttgtcgcattgttggttgctattccattgggcttcttgcttggaaggaatcgttggctatacaacgctatcgaaccgctatttcaattgattagaccgatatctccgatagcatgggcaccatttgttgttctatggtttggtattggtagtttgccagcgattgcgattatttttatcgccgcttttttcccaattgtgttcaatactattaaaggcgttagagacattgaacctcaatatttaaaaatagcggcaaatttaaatttaactgggtggtcattgtatcgcaatatattatttcccggggcatttaaacaaatcatggctgggatacatatggcggtaggaacaagttggatatttttagtttctggtgaaatgattggtgcacaatcgggattaggttttttaatcgttgatgcacgaaatatgttgaacttagaagatgttttagcagcaatattctttatcggattatttggttttattattgatcgattcattagttatattgagcagtttatacttagaagatttggtgaataaggagagatgatgatgactttagaaacgcttatcaaagaacaattagatcctcatttagtagaagttgatgaagggacgtattatccgagaacatttattcaacaattatttgtagatggttatttcggtgaggcggcattgagaaaaaatgctgaagtaatcgaagctgtatcgcagtcttgtttgacaacaggattttgtttatggtgccaattagctttttcaacgtatttagaaaatgccacgcagccacatttaaataatgacttacaacagcaattgttatctggagaaatattaggtgctaccggattgtctaatccgatgaagtcatttaatgatttagaaaagttgaaccttgaacacacttatgttgatggacaattggttgtcagtggacgtatgccagctgtaagtaatattcaagaagaccattattttggtgcgatttcgaaacatgaatcatcagatgaatttgtcatgttcattctacgtgccaatcaagatggtatcactctcgttgaaaaaacaaattttttaggggtaaatggctcggctacgtatcaaattactttgaatcaagtcgtagtgccacaatcacaaattatcacgcatgatgcgaagcagtttgcggcaactattcgcccacaatttattgcttatcaaattccaataggattaggctcaattaaaagttctttagagttaattgatgcattttcaaatgcgcaaaacggaataaatcaatatttagagtatgatgttgaagcttttaaaaaacgttatcgtcaacttagagaagaatattatgcaatattagatgacggtaacttaacttcacatttaaatgaattaatatcattgaagaaggacatcggctatttattgctagatgtaaatcaagcttctgttgtcaatggtggttcaagagcgtacacaccatattcgccacaagttcgcaagttaaaagaaggattcttctttgcagcattgacaccaacattaagacatttaggtaaacttgaagcagagttgaaggggtaagtgtgataagctgattttttgtttagatgcgtttgttgaaacattttttaaaataatataaatcttagtttataaacattttctgttaatttgttatatccttttaactaggaaaatatacatttcgtaataataataatcgttatcattgaaaaagtgttaataaggtgtataatgaaaatgtgaacaattaatgaacttcttattttaaagaaggtgaatactatagatacgcatactaaagaacaacaattctcgaatctagtaagatcttatcgtaaagaatacgtgggtaaaggacccaatagtattcgagtgtcgtttaaagataattgggcgattgcacatatgacaggtgttttgagtaaagttgagagtttttacctaaacgacaaacgcaatgaatcgatgctccattatacacgcacagagaagattaaacagatgtataaagaaatagatgtaaatgagatggaaagtcttgtaggcgctaagtttgtaaaattatttacagatattgatttgaatgatgatgaagtcatttcaatatttgttttcgataagtcaatagaataagtgttgctggtgtaaggtacacggtgctgtttgctaacttcgctttgaatttaacaataattcaagggggtggtatgtcaaacggtgccgttttttttgtcatatttttaaaacaagcaacatgcaacacgtactttaaggaagtcaaaatttatcatttaggagagatggatatgaaaatcgtagcattatttccagaagcagtagaaggtcaagaaaatcaattacttaatactaaaaaagcattaggattaaaaacatttttagaggaaagaggacatgagttcattatattagcagataatggtgaagacttagataaacatttaccagatatggatgtgattattagtgcgccattttatcctgcatatatgactcgtgaacgtattgaaaaagcaccgaacttgaaattagcaattacagcaggtgtaggatctgaccatgtagatttagcggcagcaagtgaacacaatattggtgtcgttgaagttacaggaagtaatacagttagtgtggcagaacatgcggttatggatttattaatacttcttagaaactatgaagaaggtcatcgtcaatcagtagaaggtgaatggaacttgtctcaagtaggtaatcatgcgcatgaattacaacacaaaacaattggtatttttggatttggtcgaattggacaacttgttgctgaaagattagcgccatttaatgtaacattacaacactatgatccaatcaatcaacaagaccataaattgtctaaatttgtaagctttgatgaacttgtttcaacaagtgatgcgattacaattcatgcaccattaacaccagaaactgataacttatttgataaagatgttttaagtcgtatgaaaaaacacagttatttagtgaatactgcacgtggtaaaattgtaaatcgcgatgcgttagttgaagcgttagcatccgagcatttacaaggatatgctggtgatgtttggtatccacaacctgcacctgctgatcatccatggagaacaatgcctagaaatgctatgacggttcactattcaggtatgactttagaagcacaaaaacgtattgaagatggagttaaagatattttagagcgtttcttcaatcatgaacctttccaagataaagatattattgttgcaagtggtcgtattgctagtaaaagttatacagctaaatagaataaggatgctgggctagcgattaacgctttcaattttatataaatgaatcatataagcactactgctgttgtaaagatggcagtagtttttttatgattacatctaagtatagtcacggctatgttaggacaatgatttaacatttacgcacatatgtgttcacttacgcaattattgataaatttcattcatttggaataatatatagtcatatagtgctaatttttttgaggcattatatgcaagatgcattgtaaaatcgatgcatttgtttgttaaataactttgtataactaaaaattctttgtttcaacgtataatctaataatagattttatataaatggtagtgtgtatatatgtggataggggtgtagttattaatgaaacgcttaagtacgactttgaaagtacgattgattagcaattttttacagctaattattacgacagcatttataccgtttatagcactatatttaacagatatgttaagtcaatcaattgtcggtatatatcttgttggtttagtggttctaaaatttccattgtccattatatctggttaccttattgagatttttccgaaaaagttgctagtacttatttatcaagcgacgatggtgataatgcttgtgttcatgggcgtatttgggtcacatcaattgtggcaaattattggtttttgtgttgcatatgccatatttacaatcgtttggggattacaatttccagttatggacacattaattatggatgcaattaccgaagacgtggaacattatatttacaagattagctattggatgacgaacttatcggtagctattggggcattgttaggtggcttgatgtatggctacagtatgttactacttttcttaatagcagcttgtatatttttaattgtactctttattttatatatttggttacctcaagaccgaaatcaagtaaagcaaagtgatgacaagaggcatgcaagtcgttatcaaaaattacaaataatgaatatatttcgcagttataaattagttttgaaagaccgtaattatatgttattgatttcggggttcagtatcatcatgatgggtgaattttcaatctcctcatatattgctattagactaaaggatcagtttgaaacaataagtataggttcatatgatattacaggtgctaagatgttagcaatcttgctaatgattaatacggtcgtcgtcattttactcacgtattcaatctcgaaagttgtattgaaaatagattttaaaaaagctttaatcactggtttgctgatttatattgttggctatagtggtctaacctatcttaatcagtttggcttattagttgtttttatgataattgcgactgtaggtgaaattatttattcgcctatagtttcagaacaacgctttaaaattattcctaaagctaaaagaggaacatatagtgcagttaatgcattaggtattcatttttcagaaacactagctaggttagggattgtgttgggtgttttcttaacgtcattacaaatgggactgtatatgtttatcgttttaacaattggtgctagcatgcttgttgctggtgtatttgggggacaaaaacaagtgaatacaaattgaatttatttaaatatttattttatgcatctttttatatggaaaacctattaatttggtcgtaattaaaatagagataaatttattaagaatttgttgaaatttaaggataacaattgttttatgcgagttgtttgtttaatataaacttgcttcatggatattttgtaacaacaatattgagtttgcaatgagatgtgaacaacagaaagtgattaacgagttgtagtgtgctatttatcgaagatgtatgtaatttacattgaaaaatataccaattgtaacgatgatacaagatgtattttagggtagaatatatcgctcatatgttgcgaatggtgttttatattaatcattacataacgagttaattaacatttcgtcggttatcatatcatcatgcaatttcagtaagtaatgagtattatgatatgaaagaaggactttttatgattatgggtaatttgagatttcaacaggaatattttcgtatatacaaaaataatacagaatcaacgacacaccgtaatgcgtattgggttaaactcgctaaaaatgttgaagctactaaaatgatgtatgcattatcgacaattgtgcaacaacatgcatctataagacatttttttgatgttactaccgatgacaatttaacaatgatacttcatgaatttctgccttttattgagataaaacaagttccatcttcttccgcaaactatgatttagaagctttttttaagcaagaattaagtacttaccattttaatgattcacctttattcaaagttaaattgtttcagttcgctgatgctgcatatatactattagattttcatgtgtccattttcgatgatagtcaaattgatatttttcttgatgatttatgcaatgcatatcgtggcaatactgttattaacaatactcgacagcatgcacatataaatagaaatgatgataaagacaatcaagatgcatcgcatatagcattagactcaaactattttcggttagagaataactctgacatccatattgatagttattttccaattaagcatccatttgaacaagctttatatcaaacgtatttgattgatgatatgacatcaatagatatggcatcgttggctgttagtgtgtatttagctaatcatataatgagtcaacaacatgatgtcacattaggtatacatgtaccatcacatttaccaaatgatttacacggaaatattgtgccgttaacgttaacaatcgatgcaaaagatgtatgtcaacgttttacaacagattttaataaatgtgtgttgcaaaatatgtcgcaattacagtgcgcgaagtcttcgctttcactagagactatttttcattgttatcatcatatgatgtcttgttgtaatgatgttattgaggatgtacatcaaatacatgatgcacatacatctttagcggatattgaaatttttccacatcaacacgggttcaaaattatatataacagtgcagcatatgatttgctctcaatcgagacgctgagtgacttagttcgaaatatttatttgcaaattactgaagaaaatggaaataaacgaacaactgtagatgaacttaatttgatgacagaacgtgatattcaattatatgacgatatcaatttaagtttgcctgagatagatgatgcgcaaacagttgttaccttatttgagcaacaagttgaagcaacgccgaatcatgtcgctgtgcaatttgacggagtgtttataacatatcaaacattgaatgcacgcgcgaatgatttagcacaccgtttgagaaaccagtatggtgttgaacctaatgatcgtgtcgctgtcatagctgaaaaaagtattgagatgataatagcgatgataggtgtgttgaaagctggtggggcttacgtgccaattgatctgaactatccaagtgatcgtcaggagtacattttaaaagatgtaacgcctaaagttgtaataacgtaccaagctttatatgaaaatggtaaacaaaatattaatcacattgatttgaataagatagcgtggaaaaatattgataatctttctaaatgtaacacgttagaagatcatgcttatgttatttacacgtcggggacaactggtaaccctaaagggacactaattccgcaccgaggtattgttcgcttggtccatcaaaatcattatgtaccattaaatgaagagacgacgattttgttatcaggaactatagcctttgatgctgcaacatttgaaatatatggtgcattgctcaatggtggaaagctgattgttgctaaaaaagaacaattattaaatccaatagcggtagaacaattaatcaatgaaaatgacgttaatactatgtggttaacctcctcattatttaatcagattgctagtgaacgaatagaagtattggtaccgttaaagtatttattaattggtggagaagtattgaatgctaagtgggtggatttgcttaatcaaaaaccgaagcatcctcaaattattaatggttatggaccaactgaaaatacaacatttacaacgacgtataatatacctaacaaagttccaaatcgtattcctattggtaaaccgattctgggtactcatgtttatatcatgcaaggcgagcgtcggtgtggcgttggtattcctggagaattatgtacaagtggctttgggttagctgcaggttatttaaatcagccagaattgacagcagataaatttatcaaagattcaaatataaatcagctgatgtatagaagtggtgatatcgttcgtttgttacccgatggcaacatagattatttatatcgaaaggacaaacaagttaagattcgagggtttaggattgagttgtcagaggttgagcatgcgctcgagcgtatacaaggtattaataaagcagttgttattgttcaaaatcatgatcaagatcagtatatcgttgcttattatgaagcgatgcatacattatcacataataagattaaatcacaattacgtatgaccttaccggagtacatgataccagttaatttcatgcatattgagcaaattcctattactattaatgggaaattagataagaaggcattgcctatcatggactatgtcgatacggatgcctatgtagcaccgagtacagataccgaacacttgctatgccaaatttttgcagatattttacatgtgaatcaagtaggtattcatgataatttctttgaattaggtggccattcattaaaagcaacgttagtggtgaatcggatagaggcatctactgggaaacgattacaaattggtgatttattacaaaagccaactgtatttgaactagcacaagcgattgctaaggttcaagaacaaaactatgaagtgattccagaaactatagttaaagatgattatgtgctgagctctgcacaaaagcgtatgtatttattatggaaatcaaaccataaagatacggtgtataacgtaccttttttatggcggttatcatcagaacttaatgtagctcaattgcgacaagcagtgcagcgtttgatagcgcgacatgagattttacgaacacaatatattgttgtagatgatgaggttcgacaacgtattgtggcagatgttgcagttgactttgaagaagttaacacgcattttacggatgaacaagaaatcatgcgccaatttgtagcaccttttaatttggaaaagccaagtcaaattagagtgagatacattagaagtcccttacatgcatacctctttatagatacgcatcatatcattaatgacggtatgagtaatatacaattaatgaatgatcttaacgcactttatcaacataaattattgttaccacttaaattgcaatataaagactatagtgagtggatgtcgcatcgtgatatgacgaaacatagacaatattggttatctcaattcaaagatgaagtacctattttaagcttaccgacagactatgttagaccaaatattaaaacgacaaatggagcaatgatgtcatttacaatgaatcaacaaatgagacagctacttcaaaagtatgtagaaaagcatcaaattactgattttatgttctttatgagtgtggtcatgacgttgttaagtagatatgctcgaaaagatgatgttgttgtcggtagtgtgatgagtgcgcgtatgcataaaggcacggagcaaatgctaggcatgtttgctaatacgttggtatatagagggcaaccgtcacctgataaaatgtggacacagtttttacaagaggttaaggaaatgagtttggaggcatacgagcatcaagaatacccattcgaatgtttagtaaatgacttagatcaatcacatgatgcctcacggaatccattatttgatgtcatgttagtactacaaaacaatgaaacgaatcatgctcattttgggcatagtaaattaacacacattcaacccaaatcagtgacggcgaaatttgatttatctttcatcattgaagaagatcgcgatgactatacaatcaatatcgagtataataccgatttatatcactcagaaacagttcgtcacatgggtaatcaatgtatgattatgattgattatattttgaagcatcaagatacactacaaatttgtgatataccaaacggcacggaggaacttctaaattgggtcaatacgcatgttaacgatcgaatgcttaatgtcccgggaaataaatctatcataagttactttaatgaagttgtctcacgacaaggtaatcatgttgcgctagtcatgaatgatttgacaatgacgtatgaaacattacgcaactatgtggatgccattgcgcacatgctcctatcaaatggtgtgggcaatggtcaacgggttgccttgtttacagaacgtagttttgaaatgattgcggcgatgttggcgacagttaaagtaggtgcatcttatatacctatcgatattgattttccgaataaacgacaaggtgcaattttggaggatgctaaagtaactgcagtcatgtcttacggcgttgaaattgaaacgacattaccagtcattcaattggaaaatgctaaaggctttgttgaatcaaaggaaaatgaacaatatgatgatttacatggcaatcaacttgaaaacacagcgatgttagataatgagatgtatgctatttacacatctggtacgaccgggatgcctaaaggggttgccatacgacaacgaaatttgttgaatttagtgcatgcatggtcaactgaattgcaattaggcgacaatgaagtatttttgcaacatgcaaatattgtttttgatgcatcagttatggagatttattgttgtttgttaaatggtcatacgcttgtgattccagatagagaggaacgtgttaatccagaacagttacaacaactcattaataagcatcgtgtgacggttgcgtcgattccgttacagatgtgtagtgttatggaagacttttatattgaaaagttgattacaggcggggcaactagtacggcatcctttgttaaatatattgagaagcattgtggcacgtatttcaatgcctatggaccatctgagtcaacagtcatcacatcgtattggtcacatcaatgtggtgatttgatacctgagacgattccaattggcaaacccttatctaacatccaagtgtatattatgtcagatggtttgttatgcggtattggtatgccaggcgagttgtgtattgcaggtgatagtttagcgataggatatattaaccgtccagaattaatggctgataaatggcaaaataatccatttggtaaaggaaagttgtatcatagtggtgatttagcacgttatacatctgatggtcaaattgaatttttaggaagaatagataaacaagtgaaagttaacgggtaccgtattgaacttgatgaaattgaaaatgcaatattagctattcgtggtatatctgattgtgttgttacagtaagtcactttgatacgcatgatatattgaatgcttattatgtcggagagcaacaaatggagcaggatttgaagcaatatttaaatgatcatctgcctaagtatatgattcctaagactataacgcatatcgattatatgccattaaccacgaatgacaaggtggatactacgcgtttgccaaatccatcaactatacaacagtctaataaagtgtatagcgaaccatctaatgaaattgagcagacatttgttgatgtattcggagaggtattgaaacaaaatgatgtcggtgttgacgatgatttctttgaacttggtggtaactcattagaggcgatgttagttgtctcgcatttaaaacgatttggccatcatatttcaatgcagacattataccaatataaaaccgtgcgacagattgttaattatatgcaccaaaatcaacaatcattagttgcattaccggataatctttcggaattacaaaagattgttatgtctcgttataatttgggtgttttagaggatagtctaagtcatcgacctataggaaatacactattgactggcgcgacagggtttttaggtgcttatctgattgaagcactacaaggatacagtcatcgcatttattgtttcatacgtgctgataatgaggaaatagcaaggtataagttgatgacgaatttaaatgattatttttcagaagagacggttgaaatgatgttatcaaacattgaagtcattgttggtgatttcgagtgtatggatgatgttgttttaccagaaaacatggatacgattattcatgcaggtgctcgtacagatcactttggtgatgatgatgaatttgaaaaagtaaatgttcaaggtactgttgatgtcatacgtttggcacaacaacatcatgcaaggttaatatatgtgtctacgataagtgtgggaacttattttgatatagacacagaagatgtgacattttcagaagcggatgtctataaagggcaactactaacatcaccatatacacggagcaaattttatagtgaattaaaagtattagaagctgtaaataatggcttagatggtcggattgtacgtgttggtaatttgacgagtccttacaatggaagatggcatatgagaaatataaagactaaccgtttttcaatggtaatgaatgatttgttacaactggattgtatcggggttagcatggctgaaatgcctgtagatttttcttttgtggatacgactgcaagacaaattgtcgcattagcacaggtcaacacaccacaaatcatttaccatgtgctatcacctaataaaatgccggtgaaatctttgttagaatgcgttaagcgcaaagaaattgaactcgtcagcgatgaatcatttaatgaaattttacagaaacaagacatgtacgaaacgattggattaactagtgttgaccgtgaacaacaactagcaatgatagatacaacattaacattaaaaataatgaatcacatcagtgaaaaatggccaacgataactaacaattggctgtatcattgggcacaatatatcaaaacaatattcaataagtaagtagggaaagttatgacagtatttgtaatgcaattacagagtaacttgaaaagtattgaagaattaatatcacaaagtcgttggtcatataaaaaaccgcgtacagtcaactatagatacaatcaagataaactcatgcacagattgggagatattttagtgcaatatggaattcaacatgacacaggtttattaccacatgaatggcattatcacatttcgccacgaggtaaggcagatattgttcaacacaatcgtgatggacagcccatctatgtgagcttatcatatagttatccttatatcgtgtgtgttgtcgataaagaaccagttggtattgatatcgaaaagatatcacaacgtttagactggcgtacgttagtgacgtgtttctctacaaacgaagcacatcaaatatgtagtttaaatgatttttatcaaatatggacacaaaaagaaagttttacaaaattgattggtgaaggtttaatcaaaggattggacatttatgatatgacacaatcacacttttatcaatcacgtgaagtgaagttcaaacaatttatttttgatcagtttatggtacaggtatgtttcttaggacaggcaccctgggggtataaaaaagtgtctgtatttcagttattgagtagttaatatgacgtctgacagtatcattgcgcagtgattttaaactatactgcctaaatgtttactgttagatgtttttttattggaaaaatgaaaggtgaatacacgatggcatcattcaaaatcatgacgagattaaagtaagtgataaggtaaaaatatactgagcaatattgaaattaccgaaaataatagtttgttacgacgcatttgagactttaatgctcacgtaagttggctggaatcatatcatgtcagttaataaaataacgtgagcatcaatcatcatactcaaacgatgatttaaaactcacgttaatgttagtcagtgtattaatttaatttatagcgatagacaaaatgttgtcgcactaattcaattgtcatcatccagacgatatggccaaagaattctgacagatgctcttggaatggttgatcccacacagcaggtacagtatgcatgattggcataatgataaggtggaataatacccaaatagcaataccaaaaacagcaccttgtcccattgctaagtaagcgtattttttaactaatatgcagtaaataattgcaatgacgatagaaaaactaaagtggacaataaagcttacccaaggcaattccatatttgaaaatgtatatgtttgatgcgtaaactcactactaaatcctaattgttgcaataactcttgaggtgggttcgttgcattacgttctggtgtgcgaggtggaaacatgacctcccaacctaattttacaattccagataacaagccaccgataattccagcataaatgaatatacccatttgtcgtttcgtcaacttaaggactcctctctatttactatcctcattatagtattttgtgaaaataatcacaataaaaagctttgcagaacttaaaatattttgataaacaaatttgtaaaaggttattagttttttacatctcatattgtatcgtactgtattcaaaattgttaacgagatgaacggtaaataaatgttttagcgcaatggataatcgaactggaatcatctcgcgtgtcaaaacttgttaggccttaatttcatagttatgaattaaggattgttgtgccaacaaaatcattattgtaaatagattcaatgatatttggcttgtttcctgatgcaatgataactttaggacagccattttcaatcgcatttttggcatctagcactttgggaatcatacctccataaatatcaccatgttcaatatattgatgaatatcgactaatggcaattgaggtataacaacatcattgatgagtacacctgcaatattacttaatacataaataggcgcttttaatgatgatgcaataaaataggcaagcgtgtcagcattaatattgtaaaattctccatcatggttattgaaaccaatcgaattgatgataggtacaaatttagtacataaatactgtaaagcatccttatttaaagcggtcggaacaccgacatatccatattgttgatcaaaagatgtaatttcaaacagctgtgcatccaaaccacataagcctattgcagaacattggtgctggttaaattgagctactaatgcagtgttaacgtctgcaatgagcgtgtgtttagtaatggtcatggttgctttatcagtcactcttaggccattaacaaagtgtggctcgatttgctggtttgataatgcttcattaataaatgggccaccgccatgaacgataatggggtagatgttgtttgatcgtaaatgcttaatgttgttaataattgatggatgcatgtcactaagtgtactgccaccaattttaatgacaataaatttcatctaaccaacaccaccttatgttcgatatgatgcgttgatacgcacataatcataggataaatcacaaccgtatgcagtcgctgcagcgttacctaaaccaagctgaacgtcaattgtgacattttcatgagttaatgtattcgacatagcttgctcatcaaatagtacagccatacctttatcaacgacaggtatttggttcagttgaacatatgtgcagttaggatcaatttcacatccgctgtagccaatagctgtaatgattcgaccaaaattggcatcttcgccaaaaatagctgattttactagatttgaacttacgatagttttaccgatttttcttgcatctgatattgatttagcgcctgacacattgacgctgattaactttgttgcgccttcgccatctctggctatagctttagctaaaaatgtacagacaaaattgaatgcatcaacaaatgtttcccattgtggatggtcttgactaagtatttggtgttcaacttggtgatttgccatgactaataccatgtcatttgtacttgtatcgccatcaacagtaatcatattaaatgtatggtcagtcgaagattttaataattgatgaagtgtattcgattcaatcgatgcatcggttgttataaaagcaagcatggtagccatatttgggtgaatcatacctgaacctttggtgctaccaccaattgtaacggttttaccatcgatttttagtgatacagcgatatgttttgtacaggtatcagttgttaaaattgcctcgttaaacgcacctggcgttgcaaaattagcatccttaatatgttcggtcccagtcttaattttatccataggcaaatattcaccaatgaccccagttgaagcaacagcaacatgctcagatggtatttgaagttgttgagcaacccatgtttgtgtttgtcgtgcatcatctatgccttgttgaccggtacaagaatttgcattagctgaattaacaacaagtgcttgtaattttcctttagacttttgtaaagtgtcttcagtgacaataagtggtgcagctttaaactgatttaaagtatatacggcagctgcacttgccaaagacgatgagtaaatccacccaaagtcttttttgttagcgcgtaaaccgatgtgcataccaccagccgtgaagccttgaggtgtactgatatcgccatgtttaataattgaaaagttatattgttgtgatgtcgtttcttgatgtttcattctaacaccccttatggataaactggtgattgatttaggccagtcgtcacttcaaaatcatataatatatttaaattttgaatggcttgcccacttgcgcctttgacaaggttatcaatcactgatactaaaattgctgtttgcgttgtttcatctacatagatgccgatatcgcagtagttactaccgagtacttcttttgtggttggaaaagtcccaatatctctaattctgacaaatggctgattagcataataagaggtcattaatttatgtaatgattcagtcgtatattcagatgataatttgacatatattgttgataaaatacctcgtgtcattggtacgagatgtggtgtaaatatgactgatacatcttgacccgcaatgatagataaatattgctcgatttccggtttgtgtttatggtttccgattgcataagcgcttagattttcattcatttctgaaaaatgaacacgttgtgataatgaacgaccagcacctgacacgccggtcttagcatcaataataatagatgacaaatctactattttttcgctaataagtggatgtaatgctaataatgttgctgtagggaaacagccaggattagaaatgagcttcgttccattgttatcaaacgattgccattctgaaatgctgtaaatagcatgattcaaatcatcttgtgctgcagcagtttctttgtaatatgcttcatatatttcacgattcttaattctaaatgcgccagataaatcgataacatgaatacctttttctactaagggagggatacatgttttacttacgggtgctggtgtcgcaaagaaaattacatcacagtcattattgtccactgtaagtgcttcgaaatgttgcataatatgttgtaaatgtggaaatgttaatttcaacggttcatctacttttgaatgtgagtagatgtgtgcaatcgttacatgaggatgtgtttgtaacaatcgaattaattcaattgcgccataaccgctaccgccaacgatacctactttaatcatcatgaatccctcctatgtcatatataaatgattaattgttaatttttaaaaacgtcttgaaaagctgcaacaatttgatggatttcctctttatcaatgactagaggtggagacaatcgaatgatagtacgatgcgtgtctttgcataagattccacgttgaatcagttgatccacaaaaggtgcagcatctgtgttaagctctatgcctataaataaaccacgacctctaatttctttaatactaggatgtttaagttgtagcaacgcttttaataaaaatgaacctaagcgttctgatcgttcaaccagttgttcatctttaagtacatcaagcgctgccgtcgatattgcaatggctaaagggttaccaccaaatgttgaaccatgtgtacctggtgttagaacacgcatgacatcattatttgcaagtacagcagatacagggtataagccgccacccaatgccttacctaaaatataaatgtctggaacgacttgctcccattccatagcaaaccatttcccagttctaccaagaccaacttgaatttcatctgcaatcaataatatttgatgtttatcacatagttgacgcacagcttgaatatatcctttcggtggtatattaacgccaccttcaccttgaattggttccaaaataattgctgctgtattcggtgaaatagcttgtgttaattgttcaatgtctccaaaatctactgttgtagtgccttgaagtagggggtgaaatcctgctttatatgcgtcgtggttagatagtgataatgagccaagtgtacgaccgtgaaaattgttattcatagcgatgatttcaacttgtccgtcagtaatgcctttaacttcagagccccattttctagcaattttaatggctgcttcaacagcttcagtaccagagttaagggggagtactttgtctttcttagcaagatgacaaattttttcttcccatttcccgagattgtcactataaaggacacgtgaaatgatagacaactttgaagcttgttctgtcatcgctttaacaattgttggatgacaatggccttggtttgcaactgaaaaacccgaaatgcaatctatatattgtttgccatcagtatcccaaactttgacacctttacctttagaaatgacaagcttaagtggtgcataattattagagctataataatcagttaattcaatgattgaattcatcggtctccctcctttatatttatacattttaaagaattaatattaatatattacagttgttcaatataagtgtcaaatgtaaatttaataatataaagataaggttgtgtttgtattaatgtgatttgtaaaatgaaagtactaatattttttgtggataatcattgatatgtatgtatacgattgcagtttaatgtagtatgaataaaaaatgccacaagcatatgtttaacatatgactgtggcatagtattatgcttgtggaattttacgatgcttaattttataaataatgaagccgataatgaaaccaatcaaactgagaacaacccagcccataccaatgtctgataatggtaaatatttttggctgaaattaatcaaagtttgtgagaatgatgtgcttgaaatgaactctggactagcttttaatccatctactaatgcagcaatcattgtaaagaaaatggtacattgataaataagttttgaatgatggaatttgctactaaataatgttagtacaatcaaggcaattgctaatggatataagaacattaacactgggactgagtacataataatcttagttaaaccaacattcgcgaataagaacgaaataaagcttacaactgttgcaatcgctaggtaattcattttagggaaaaggtgttcgaatgtttctgaaaatgccgtaatcaaaccgatggctgtttttaaacaagcaaccataacgataagtgacaacaggacgataccgtagttacctaagtagtattgagtaatttgcgctaaggcaataccaccattttcactaagtttgaaatgaccaatacttaatgtacccatgattgctagtagggtataaatgatccccatcataatgatactgatagtaccagacttaattgtttctttagcgatatcagttggattttcgatacctaactttttaatcgttgcaacaatgataataccaaatgccaatgacgctagcgcatctaaggtattgtatccatctaaaaagccgttaaataaggcatttgattgatattgtttactaataggtgcatcagatatgccacctaatggatggataaaagcaaataataaaataattgctaataatactaagaataccggatttaaaaatttaccgatatattctaaaattcttgatggctttctcgcaaaaaaccatgcaatcacaaagaagacgaagctaaaaataaataaatataaagtgatttgctttggtgataaaaatggcgaaaatgcaatttcaaatgatgtcgttgccagtctaggtaaggcgaaaaatggtccgataactagatataaggcaatcgtgaaaatgtaagcatatgttttattaacacgcgatgcaatttcaaataaaccagatgtctttgaaatgccaatagcaatgatacctagaaatggtaagccaattgctgtaattaaaaatcctaagttagcgataaaaacgttagaaccagcagcttgacccaagtgtattgggaagataagattgccggcaccaaagaataaaccaaataacatagaacctataaacatgttttctttaaatgttagtttcttcttcatatatgtatttgttctcctttttagaacttataaaaatctacttaattaagataatatcaaaaattaaacataaagtgatacataattttgcaataaatactaaattttttgaaaattccggaataaatactgttttttatgtagtaggggcgtaagttaagaacgatttaacagatatagaatatgttaaatatagaaggttagacaacccgacgtattaatactttgtgaaataaagatccccctcaacatgatcgaaggggggaagtatatgtttagttcaatatatttagaaagtcgtttgtagttattgtttgtcccatcaatgggaatacattatctattggaaattgatgtagcgtttcgttttgtgcactcatcatatctgtaacaaaaaactgattgtagtttaattgataggcatctcgcgctgtcgtatctacgccaatatgcgttgcgacaccaccaagaacaatcgtatcaattcctcgacgtcgcaattgtaagtccaaatctgttcctacaaatgcactaaaatgtcgtttgtctatgacaaaatcgtcatctctcttgtctaataaatgatggaaacgactgtagtcgtcgccttcttttggtggtaatgagatcattgcatttggttgcaatacatctttaccatcatagaaattcacgcgaacaaaagcgataaagccattgttttttctaaaaacatctattaatttattagcgttttgaacgacattttcagctgtatatggggcataatccattttaagaataccttcttgcaggtcgattaacactaaagcggttttattaaaattaatcatcttatatcagagtcctattcgtttaataaagtattcgcttaaacttataccctgtatacgatgaaattatttattttgttgtgaaaaagctttagcgatatcgatgagtttcttcggtgcgtcttcgacagacattttgacttcgacaaaatgcatcacatcgggatgaccattaattgcattaaacgtgtcttgtaaatcttttgatgattcaacgtcatgaatttcaacatttttaccaccaaatacagctggtaaagctttataatcccacatgtgaatttcattataaggttcatacatgccgtgaataagtcgttctaccgtatagccgtcattattaatcacaaataataccggtttaatatgctgtctaatcatagttgaaatagcttgaacagttagttgcaatgagccatcaccaattaataataagttacgacgatctttgtctgctaattgtgaacctaatgttgcaggtaatgtatagccgatagaaccccataacggttgccctataaaagtattgtttttgtataatgctaaatcataagcaccaaagaatgatgtaccttgatcagcaatgatgacatcatttggttttaagaaattttgcatcattttaaaataagtttgttgtgttaatggttctgtgccaacagtataatcgggtgatgttggacgatgatacgcagggaacgttgcgttattcgtatatgaaatattggataactgttttaacaatgatggtagagatatttcatcatttgtaacatcgtcaattttgatattgtgatgatttaacataacgacatcatcgatattgaattggtatgaaaaacctgctgttgctgaatctgttaatttggctccaatatttaaaattaaatcgctgttgtccacataatctcgtattttatcttcggcaattttcccatcgtaaatacccatataatatggattttcctcattaaaagcaccttttcctaatgaaagttgtgctactggtatctgtgtttgatttacaaaatcttctaattcttgatgaaggtgaaaactgttgatttcatgtccagtaatgatgataggctgcttcgattgatgcaatttagatgttaataactctatatatgttgatgcatccgtatctttggctgccgttacttcaaatggtgtcggtatctcaatttcagagattgcgacatcgattggtaaatgtaaatgaactgggcgtctttcggcgattgctgtattaattaaacgtggtatttcggttgttgcattttcaggtgtgatataaccttgtgcaacggttatatgtgcaaacatttttcggtagtcgtcaaatgtaccttcaccaagtgagtgatgtacatatttaccggcatgttcaacagcacgtgtcggcgcacctgtaatcgcaatgacaggtatgcgttcagcatatgaacctgcgataccgttgacggcacttaattcgccaacaccaaatgtagtaactaatgcagcgagtccattaagacgggcataaccgtccgctgcgtaacttgcgtttaattcatttgtatttcctacccaatctacattgggattgctgataatatcgtctagaaaagcgagattaaaatcaccaggaacaccaaaaattttatcgacgcctgctcgatgaatagcgtcaattaagtaagctccaatgcgttgtttcataaaaaaaccaccttttctctatatttacacttaaaatgatagcctcgaatatagtgtaaggtcaaggaagttgactttgttgtgaaaacgctaacaatagtgaacaattaatattttttaggaaatgagtatgaaggggggctttaattgatgatcttaaaattcaaaatttaaggggagagcgaactatcaatgatgctgcaaaatacaatagcaaagaaaaaacaggcgcgtcaccttatgaaggtataggcacctgtttatagtaagcattatttagcttcaaataattgatcgccaaatgaaatgttgccatgttcaccttgtttaaaatcaaggtttgtaatgtttccttgtgtcacgataataggcgtaatatcactctttgcatgattgcggatgtagtctaaatcaaagttgattaataaatcaccttgtttaacttcttgaccttcctcaacatgtaaagtaaagccttctccgtttaatttaacagtgtctaaaccgatgtggattaataattctaaaccactatctgatacaagaccaattgcatgttttgttgggaaaatcatttgtactttaccgttgaatggtgcacgaacttcaccttgtgaaggtttgatagcgataccgtcacccatcattttttcgctgaacacttgatcaggcacttctgataatggtgttacttcaccagttaatggtgcatgcacgatatggctcaattcgcttgttgcagatttatcttctgcaacaacaacagtttcgtctttatcgtcttccatagtagtaggattttctactacttgaccattcataatctgttgcatttcatgtttgatttggtcagatttaggaccaaaaattgcttgcatattattgccgacttctaatacaccagatgcgcctaaatctttcaaaccaggaacatcaactttagatttgtcgttaacttcaacacgtagacgtgtgatacaagcgtctaaatgtttaatgtttgctttgccacccatagcttctaatactgcatatggtaattcagttgctgaagcagtagccgcttgtgattgtttatcttcacgacctggtgttttgtattttaattttacaattaagaatcggaatacgaagtagtaaataactgcgtatacaagacctacaggaataactaaccaccattgtgtcttattaggtagtataccgagtaagaagtagtcgatgaaaccacctgagaatgtataacctagatgaagatctaataagtacaatgttaagaatgataaaccatcaagtactgcgtgaataaagaataataatggtgctacaaataagaatgagaattctaatggttctgtaataccagttaagaatgatgttaaagcagcagaacccattaaacctgctactactttcttattttcaggtttagctgtgtgataaattgctaaagctgctgcaggtaaaccgaacatcataacagggaattcaccttgcatgaatttaccagctgtcaaatgtgcgccttcacgaatttgttcgataaagatacgttggtcaccgtgaataatttcaccagctgcatttttccatgaaccaaactcgaaccagaacggtgcgtggaaaatgtgatgtagaccgaatggaattaataaacgcttgatgaaaccaaataagaatacggcaacaccagtatttgaatctaataatcctgtactgaatgcatttaatcctgattgaatcgttggccaaattaatgccattgggaatgctaaaataaatgatgttgtagccatcataataggtacgaaacgcttaccagcgaagaaacctaaataagatggtaagttaatgttatagaacttgttataacaccaagctgccagggccccgattataataccgccgaacacacctgtttgtaatgttgggatacctaaaatgctagcgtaaccactcgctggatcaccaatattcttaggtgtaacttgtaaaaagtcgcccattgttttgttcatgattatgtaaccgacgaatgctgcgatagctgctacgccatcaccgccagctaatccgattgcgacacctaatgcgaaaatcataggcaagttatcaaaaatgataccaccagcacctgtcattaatttagcgacagtttgtacgccaccattttgtataaacggcaagtagtgttgtaatgattcaccttgcatagctgtaccgatagctaataacagacccgctgctggtaaaattgcaacaggtaacattagcgctttaccaatacgttgcaattgaccgaaaagtttcttcctcacttgtccaacctccaaagttgtatgtaatatttaagattcaataaaaaagacacgagcaaatagactgtgttggtaaccatcacagcttaatttaactcatgcctaatcttacttagtaacacgttggtgtatgtaattaatgtaaaagaagcaattgactaagtagtatataaaactgatacgttagtttatctagcttaccatcacatcttattgaatcttatttgtttgcgactcctattttagcatggtgaagtatgcgttttcaatacaattattaaattcaatttcaaatctcttaattattcacagattattattaaaacataatataagataatcctgaataaaatgtataaaagttattgtaataatccagcagtagcagctattatcagcacttaaaagaaaggataatctttgatggtgtaataattaacttgtgacagaaatatgtaagattattacaatgaacaggctttaactgattaatattgtaatgtgttttctcttatagtaaaatgtaagcgattacacaactcaactatattttcctaataattatattgttaaggagggctactttgacaggcttttcagtgtatttaggacaacctttagatgaagcgtatattaagcgaatgattaaacaaggttaccaaatgatttttacatctgtacaaataccagaagaagatgacgagacaaaatatcattatttcacaaaactactcaatttattaaaacatgaacaagtgacttacctcatagatgctaatccatctatattaacaccatctttttatgagcatcttcgacaatatgatgcgcaatttatgattcgtatcgatcatagtacatcaattgaggcaatcgaagcgataatggcacagggtttaaagtgctgtttgaatgcaagtattatttcccgggaattgttaacaagcttacatcaacaattgaatgattttacattactttcattttgtcataactattatccaagaccagatacgggattatctgttgacttggtcaataagaaaaatgaactcatttatcaatttaatccaaaggcacaaatatatggttttattgtagggagtgatttgcgaggtcctttgcataaaggcttgccaacaattgaagcaacgagacatagtcatcctgtcgttgcagctaaattattacaagaaactggtgtatctgaagtgttagttggagactcattgattgaaatgaggcaggcaaaacaacttatagatttttgcaagcataggcatttcacgttatgtattgaagaagtgtttgatacgacagtgacttaccttttcgatatgtgtcataaagtacgcccggataatccggaaaatgtcattcgttcggaaacgtcaagacaaatatgtccacattcgattcaaccacagtttacgacgcaacgacgcattggttcagtaaccgttgataatttgaataacggacgttatcaaggcgaaatgcaaattgtgagacaaacgcttagtgcacatgacaatgtgaatgttgttgcacaaattattaaagaagacttaccactgttaagttgtatcgagccgaatgatacatttgattttcaaaaaactagggagtgtaagaagtgatggaaaatagtacgaccgaagcgcgtaatgaagcgacgatgcatcttgatgaaatgactgtggaagaggctttaattacgatgaataaagaagatcagcaagtcccgttagcagttcgaaaggcaataccacaattgacaaaagtaattaaaaaaacaattgcacagtataaaaagggtggacgattgatttatatcggtgcaggtacaagtggaaggttgggtgtcttagatgcagcggagtgtgtacctacattcaatactgaccctcatgaaattataggtattattgctggtggacaacatgctatgacgatggctgtagaaggtgcggaagatcacaaaaaattagcggaagaagatttgaaaaatatagatttaacatcaaaagatgtcgttataggaattgccgcgagtggcaaaacgccatatgttataggcggtttaacatttgctaacacaatcggtgctacaacagtatctatttcatgcaatgaacatgcagttataagtgaaattgcgcagtatccagtagaagttaaagttggtccagaagtattaactggttcaacacgtttaaagtctggtacagcacaaaagttaattttaaatatgatttcaaccatcacaatggttggtgtcggaaaagtttacgataacctcatgattgatgttaaagcaaccaatcaaaaactgatcgaccgttcagtgcgtattattcaagaaatatgtgctatcacatatgatgaagcaatggcgttatatcaggtatctgagcatgatgtgaaagttgcgacagttatgggtatgtgtggcatttctaaggaagaagcaacaagacggttattaaacaatggtgacattgttaaacgagcaatcagagatagacaaccttaggagggatttaaatgaccaaagaacaacaacttgcagaacgaattattgctgcagtaggtggtatggataatatagatagtgtcatgaactgtatgacacgtgtgcgtattaaagtattagatgagaataaagtagatgaccaagaactaaggcatattgatggtgtcatgggtgttatacacgatgaacgtattcaagttgtggttggacctggtacagtcaataaagtggctaatcatatggcggaattaagtggtgttaaactaggtgacccaataccacaccatcacaatgatagtgaaaaaatggactataaatcatatgcagctgataaagcaaaggcgaataaggaagcgcataaagcaaaacaaaagaatggtaagttgaataaagtattgaaatcaattgccaatatctttataccgttgattcctgcatttattggagctggattaattggtggtattgcagcagtactgagtaacttaatggtggcaggctatatttcaggtgcttggattacgcaacttataacagtatttaatgtcattaaagacggtatgttagcatacttagctattttcactggtattaatgcggctaaagaatttggtgcgacaccaggacttggtggcgtgattggtggtacaacgttattaacgggtattgctggtaaaaatattttaatgaatgtcttcactggagaaccattgcaacctggacaaggtgggattattggcgttatttttgccgtttggattttaagtattgtcgaaaagagattacataaaattgtgccaaatgcgattgatattattgtaacgccgactattgcattgttgattgtaggactattaactatctttatctttatgccattagcaggttttgtttcagacagtttagtttcagtagttaacggaattattagtattggtggcgtatttagtggatttatcattggtgcaagcttcctaccgttagttatgttagggcttcatcatatttttacgccaattcatatagaaatgattaaccaatcaggtgctacttacttattgccaattgcagcgatggctggtgctggacaagtaggtgccgcattagcactttgggtaagatgtaaacgcaacacaacattacgtaatactttaaaaggtgcattgccagttggtttcctaggtatcggagaaccattaatctatggtgtgactttgccattaggtcgacctttcttaactgcttgtattggtggtggtattggtggcgctgtaataggtggaattggacatattggtgccaaagcaataggcccaagtggtgtgtcactattaccattaatctcagataatatgtatttaggttatattgcaggattacttgctgcgtatgctggtggattcgtttgtacatatttatttggaacgacaaaggcgatgcgacagacagatttgttgggtgattaatgatgacaaatattttatatcgcattgataagcagttgagtgattttacgaagacagaaaagataatcgctgattacattttaaagaatccacataaaatcattgatatgactgtgaatgatttggcagatgttacgaatgttagtacagcatcaattgttagatttagtcggaaaatgacacatcaaggttttcaagagctaaagattgcgatatctcgatacttacccgaagatattgcaaccaatccacatttagaattgattgaaaatgaatctgtagaaactttgaaaaataaaatgattgctagagcaacgaatacgatgcgatttgtagctactaatattatggatgcgcaaattgatgcaatttgtgatgtgttgaaaaatgccaggacaatatttttatttggatttggcgcatcgagtttgactattggtgatctttttcaaaagttatctcgtattggcttaaatgtcaggttattacatgaaacgcatttacttgtgtcaacatttgcgacgcatgatgatagagattgcatgatttttgtgacgaatcaaggtagtcatagtgaattgcagtcaattgcacaggtggccacacattacagtattcccatcataactatatctagtacagctaataatccagtggctcaaattgcagactatgcattgatttatggcagaactgatgaaaatgaaatgcgtatggcggctacaacgtcactatttgcacagttattcacggtagatatattgtactatcgatttgtagcattaaattatcatgcgattctagattgtataacccaatcgaaaatggcacttgataattacaggaagcatcttgcgacgatagattttaaacattagatattgtgtgcgttctaacataaagttagttgcaacgtaaacaattgaagtttttgatgtgattcagttgcttgatgaaaaattgttgctacaagtttgtaaaactggcatagaggctattttgaaaatgataaaggcgtgacaaattaaagcaaagttcagatttgagctttgcttttttcatagatggaaattaaatgctgaagaataattttaatgctaaatgaactaatacgaaggtgctaaaagcaattattatcaaattagtgatatgaatgaaatgtttaaatcgtttgcgttgattgtattcgggacttttatagagtaggtagtagtacataaagagtatggctgcgaacatgccgaatattgaagtgaagttacctacagtgactgccatgtaatgatttaaagttaaatagtaacttagactaataataaaaaataaaatgatttgataggtaattaacaccattcaagtccctccattaatcgtagacaaaaaatttatcaatgatttgattatttgtattcaaattttagtatacgacttacctcaaagacaaatattaaaagataagacaataaaattagaataaatttacgtttgaagataaaaaacaaacatttttcattaaagtttatgatatatttagagcaatagaaagtgtatggaaggggatatgaatggcataccaaagtgaatacgcattagaaaatgaaatgatgaatcaacttgaacaattgggttacgaaagagtaacgatacgtgataataagcaattgcttgataattttagaacgattttaaatgagcgtcatgcggacaaattagaaggcaatcccttaacagataaagaatttcaacgtctgttaacgatgattgatggaaaaagtattttcgagagtgcccgtattttacgtgataaattaccacttagacgtgatgatgagtctgaggtttatttgtcgtttttagatacgaaaagttggtgtaaaaataagtttcaagtgacgaatcaagtatctgtcgaggatacatataaagcacgttatgatgtaacgatattaatcaacggactaccccttgtccaagttgaattgaaacgtcgaggtattgatattaatgaggcgtttaaccaagtaaaacgttaccgcaaacaaaattacacaggcttattccgctacatacaaatgtttatcattagtaatggtgttgaaacgcgatacttttctaataatgatagcgaactattgaagagtcacatgttttattggagtgataaacagaataaccgtatcaatacattgcaatcgtttgctgagtcatttatgagaccttgtcaattagctaagatgatatcgcgctatatgattattaatgaaacagatagaatactgatggcaatgcgtccgtatcaagtgtatgcggtagaagcacttattcaacaagcgactgagacagggaataatggatatgtatggcatacaactggaagtggtaagacgttgacttcttttaaagcgagtcagattttatcacagcaagatgacattaagaaagttatctttttggttgaccgtaaagacttggatagtcaaacagaagaggaatttaataaatttgctaagggtgctgtagacaaaacttttaatacctcgcaactggtacgccaactaaatgataaaagtttgccacttattgtaacgacgattcaaaaaatggctaaagcgattcaagggaatgcccatttattagaacagtataaaacgaataaagttgtatttattattgatgagtgtcatcgcagtcaatttggtgacatgcatcgtctagttaaacaacatttcaaaaatgcccaatactttggattcactggtacgccacgttttccagaaaatagtagtcaagatggtagaacaactgcagatattttcggtagatgcttacatacgtatttaattagagatgccattcatgatggtaatgtacttggtttctcagttgactatattaatacttttaaaaataaagctttaaaagcagaagataacagcatggttgaagcaattgatacggaagaagtatggttagcggataaacgtgtggaattagtaacacgacatatcatcaataatcatgataaatatacacgtaatcgtcaatattcaagtatatttacagtccaaagtattcacgcgcttattaaatattatgagacatttaagcgacttaacaaaaagttggaacaaccgttaacgatagctggtatatttacgtttaaacctaatgaagatgatcgtgatggtgaagtgccatatcattcacgtgaaaaattagagataatgattagtgattataataaaaagttcgagacgaatttttcaacagacacaactaatgagtattttaatcatatttcaaaaaacgttaaaaagggcgttaaagatagtaaaattgatatcttaatcgttgttaatatgttcttaactggttttgatagtaaagtactgaacactttatatgttgataagaatttaatgtatcatgatttaattcaagcgtattcacgtacaaatagggttgaaaaagaatcaaagccatttggtaaaattgtaaactatcgtgacttgaaaaaagagacagacgatgcactgagagtattctcacaaacaaatgatacggatacaattttaatgcgcagttatgaagagtataaaaaagaatttatggacgcttatcgtgagcttaaaatgattgtgccgacaccacacatggttgatgacattcaagatgaagaagagctaaagcgctttgttgaagcttatcgtttattagctaaaataatattacgtttaaaagcatttgacgagtttgagtttacaattgatgaaattggaatggatgaacaagagaatgaagactataaaagtaaatatttagctgtgtacgatcaagtaaaaagagcgacggctgagaaaaataaagtatccattttaaatgatattgatttcgaaatagaaatgatgcgtaatgatacgattaatgtgaattatattatgaatatattgagacaaattgatcttgaagacaaagcggaacaacgtcgtaaccaagaacaaattagacgcattttagatcatgcagatgatccgacattgaggttaaaacgagatctaattagagaattcatcgacaatgttgtaccttctttaaataaggatgatgatatcgatcaagaatatgttaatttcgaaagtattaaaaaagaagcggagttcaaaggatttgctggagagagatctatcgatgaacaagccctaaaaacaatttcaaatgactaccagtatagtggtgttgtaaacccacatcaccttaaaaaaatgattggtgatttgccattgaaagaaaagcgtaaagcaagaaaagccattgaatctttcgtggcagaaacaactgaaaaatacggtgtgtaatgattcagccccctcgctagattagtgtagggggcattattatttcattagaaaaggctcatttgttaaattcatcttatcaagaatataacgaatgttccttgttttaaacttattaattaatagagacattttatctgaaaatatcactgaatgctaatactaatcaaagaaaaagtgataattaaaataagatatataataccccaaatagtggatgctcgtatagaaagtttcgacgtaccaattagcatgactgtaagtatgtatgcttgtacaaaaaattgtaagtcgaaagtacccagaatgcgatttcctttagcaaaaatatttaaactagtaatagaatagtcaattaatgataaaccggcacttatttggatggtaagtataattaaactaatagcatttgtaaacagtatgtagcttaacgttgcagagaatatagattttgtattagcatctgagcgcataattctagagataactagaatgattaaaaatgtaaataatacgctgaaaactcttgagaaaaaaatactaatttgactaaaaatttttatttgtgctaatgatgtctctgagagtcctgcttcactcaataactttttatagtccacagatagtccactaacaaatgtatatgtaacaattattatcaaagtcagaaacagcttaatgattaactttggttgaatgcggatatttgcaaagtgattaagcaaaggtagttttgataatgacatatagacctcctaatgatataattctcctatattttatcataaaaataatataaaaaatatattttattaaaaataagtataaaaaatggtttgaagagtatttaacatttataggaggacataaattgaggcgtaaaaggaaatggctaattgttatttgtgtattattagtattgattacgatatcacaaattttgaaacattttaactatggaactgagagtaaagaagcatacaatacatatacggttgaaaaagaaagacaattagatttacaaggtaaggcatatccacgtgaagttaaaacatattataaaaataatcaggttggaacatatttgggtgtgcaagtagcggacgggcaaacagtcaaaaaaggagacaaagttaacttaagtattacgagtacgggtaaaacaggagcggggattataaaacaaatctctgagttgcctattagttatgaagagaatttaagtcttcacgaaaatgatgccctgcatttaccagaaagtaacaacgatggggaattagcaaattcaaaatcgatttcggcatctccaatatttaagagtaataacaactctgaattatcaaagtatggagttataattgatgatcttagtctaccaatacgtgcaggttattcgttggaaattaaagtcccattaaatgcgattaaaatacctaaatcagtattaacaaaaggcaataatgtttttattgttaataaaaatagtattgtggaaaaacggaatattcgtataaaaagaatcaatggtgacattattgtagaaaaggggttaaaacctggagacaagttaattaaacaacctaaaagtacaatgaatgatggtgataaggttgagatttcgtcatgatagaattaaagaatgtttataggacttttaaaaacggtgataaaaatattcgagttttaaaagacattaatatacatatcaatgcaggtgaattcatagcgattatgggaccatcaggctcagggaagagcacactgattaatatcttaggatttatagatcgagagtatcatggtgaatatttgtttgaaggaagtaattatcagacacaatctgataatcaattggcaaacataagaaataaaacagttggatttgtttttcaaaattttaaactaattcataataatactattttagaaaatataagtatgccactggtatatacaaatatgaatacgatagaacgaaagaataaagttatgactgtgctcagtgctgtaggcctagatggcaaaggtgattttactcctagtaaactatcaggcggtcaacaacaacgtgttgcaattgcgcgagccattataaataatccaaagtttattattgcagatgagccaacgggtgctttggattcagatacatctaaaattattatggacatatttacatcattaaaccgagataatcatactacaattattttagtcacacatgatcgtaaagtagcagaaaaagctgatcgaataattcatattttgggtggtcgtatacaacatgaagaggtgattaaatgaggaaagttttaaatatttttacaatagcttttaaatcaatattgaaaaataaaggtagaaatatatttacaatgataggtataatcatcggtatttcttctgttattacgataatgtctttgggaaatggctttaaaaaaactgctgctgatcaattttcagatgctggcgccggaaaacaagaagcgttgattagctttacttttaaagttgatgagaaaatcaaaaagtatccttttaatcaaagagatatagagttggtaaatcaagttgatggcgtactagatgcgaagctaaaggaaaataaagaagaaggaattgaagccacaataactaatgtccagaaaaaaagtgacatcttcattataaaaaaacaaaatttacactcttttaaagtaggtagagggtttgataaagaggataatgaattacgtaagaaaatagtggttataaatgatcaagtagcaaaaactgtattcaataataatgctattggtaaatcgctatatattgagggacagggatttgaagtcataggaattacggataaactatattctgactcatctaccgttataatgcctgaaaatacattcaactactatatgggacacttacatcaaggtctgcctaccttacagataattattgaagatggttacaataaaaaaactgtagttaaaaaagtagaatcactattaaataaaaaaggatcgggctctgttttaggtgagtatacatatacagacactgaagaaattatcaaaagtattgataaaatttttgatagtattacttattttgtagcagctgttgccggtatttcactttttattgctggtattggagttatgaatgtcatgtatatatctgtagctgaaagaacagaagaaattgcgatacgacgtgcatttggtgcaaaaagtcgagatattgaactacaatttttaatagagagcattttaatatgtgtgacaagtggttttattggacttattttaggtgttgtgtttgcaacaataattgatgtattaacaccagattatattaaaagtgtagtaagtttgagttctgtcataattgcggttagtgtgtcgatattaattggacttctttttggatggataccagctcgcgcagcatctaagaaagagctcatagatattataaaatagtaaatttaaaatggtaaaagtactgaagactaattatcatattaaactgactatcaacaccaacgatggaaatgcgtattagaataaaagtaagatatgtattgcaaaatgtaaattatatatttaatttacgcaaaaaataacatattacttttaagatgtaaaaaaatattatataatatttttgagaaggaggtggaaggcctatgctaaaattacataaaaaaatagcttggacaggaatcaaaggttcagctataactacatttattactgccttatataatggaagtagtgtttggaacgcgctagctgttgctggtattgcttttggtggtggcgctggtactgcggttgcagctcttggtcgtgcaacagtaatgagatttatcaaacgttggggcgtacgaaaaacagctgcttggtaaaagataatctaattctttataagagaggctttcttttttgggaaagcctctttttaaaaaaggagattcaatgaataattcaatattttatacctatttaaaatttaatcttagatattttatccgtagaaaatttgaaattgtaaaaaggtcgcgacttaatgttactacaaaaatactgtttttaattaaattgattttttcgtcactattattatttatttcaactattatgttagctgactatttcagtgattatattgattttatagaatattatttctatgcgagtatgtttatttacattgtatttataccattaatacctagaactaaattattgatcaatccaatggataaacagctgttatatagatctagtttgagagaagttgacatttttaacttgatatatgcttcagacgttttaaaaaagtttgttggatattttaatttgttgatagttggtatggctattagtttatatcatattagtccttttatatttaacctcaaggttttttgtgcactaatatacttttcaacaatctcttatgtaattcaaattatttttataaatattaaagtcataagcacaaaaaaattattttcttatcactattgtgtttttaattttatgatgggaagcattgtttctgttattggatttgtcgtctcatttcttttagtaaatttattaataaagccctttttagttttttcgacatatgtaataaaaagtaagaaaacttttgaatggtatagttattttcaggatataaagaacgaagtcattattattaatgaaaaagttatgcaattattagattatatatcacctcacactatttttatgagattaaactttgtgaatatatcatttgtgattattacaatagctttatttatagcgttatattattttaataaaatagggttttggtatagaaaagaagatatctatctatcttcaacaaatattaatttttcgttgccaatttcaataaaagctataacaacaatacagctaaaacactggataagtaacaaagaagaagttaatttacataaacctttcttctatattagttattcaatatggttctttttagggtgtttaatctatttttcacagatggcatataatcagttagctaatgcagttatttttattttgatattaaacactataactcgtgatagtttttctgcggggacggatttttttactaaatcattacgttttgattcagatagaaaaagtatcggtttgtataggatgtcaaacactgattttaaacaaatttacgattctaaattatctctaattcgctttattggttttaaagaaacaatacttgctattattttattagcaatatttttaaatcaagacatatatttatatataattggatttgaaataataatcatcaatacagtaataattcctaatttatcattattaccttcgtatttatctccacatttcaatcatcaacattacagtgaattagagtcttttgaagaacaaatttttcttgaagatactgtttttgataaagttaagaattttttatcgtcatcatattttttaattctatttgtaggttacttatctcaacgtaattatattgacataatgatttttataattattttcaacattttagccttaatacttgtttcgttgtttattaggttttctaaacaaaaaataacaaagtcttggagaaagagggatttatatttatagtattaaatacaaaaaaatttttatttttaatatattggtgttaataataggcggattattgggatgcttggtttattacttattaaatattgatttaggtaaaatgatagttgctcaagatttaaatttacaagagattttctttcataatttaatttatttcttctctgcaatatttggttttctgacacttggtctgttaaatataggtatgttactcataaattctgggatgttaggcttttttatagcacatggaatctatagcaatcaattaaaatctattctattagtattagcgccacacgctatatttgagattttagcacttttaattgcttcaacattctcattaggttttttatcatacctttatcaaagaatggtaaagaaaaataaaataaaaaataagatgttccataattttgtaacaacaataataactgttattgtattaacaataatcgcatcattattagaagtttatgtaaccataaattaaggaagtgtatcatgctagttttaaataatcttcaaaaaaaatttactaattcaaaaatggttttgaataatgtgaatgctaagtttagaagtgggagcatcaattgcatagtgggagtaaatggggcaggtaaaacgactttgttaaatattattagtagtatattgatgccaacaaaaggtgatgtatatttaaatagtgaaagtatttttgaaaatagcacactaaaaaaagagattttttacacaccagtaaatccctttttttatgaaaatttaagtgctaaagataatttgtacttaatatgtagcctatataatcggaaaatagatcaaataactattgagaaaactattaaagatgtaggtttgaatatagaagatctaaatatacctgtatataatttttcaagtggtatgaagcaaaaactaaattttgcttctatgttattagtagattcaaatgttttattattagatgaaccatttaatgcccttgaccatgttgctcaaaaaaatttcacacgaattttaaagggattagtttctaaagaaaagataataattttcactagtcatttgcctaatacaattttagaactctcagaaaatatttatttgttaaaagatggatgttttacagataaacgaaaagcacagtcatttaatcaaaccacgttagaaacatggttgttagaaagtcaaaaagaggtgataccttatgaagaaaaatgatttgttagtaatgagtgtagtatatattttaacttcagtcataatgttctacattaatggattaagtaaacaattttttacatatgtagttggtttcccaattatttattttggttatatatgtctagttaatcttataaaaaaaagaagccggaataattaaaagtgaaaaataatttgaaaatagctagagtttcactatctatgactcaaaaggagctagcaaataaagttggagtaactagacaaacaatatctcttatagaaaagggtgtacataacccctctctatcactatgtaaaaatatttgttcggtgttgaataaaaatttggatgagatatttggagagaaaccacaataaaagagcttattgaaagataatctaaaagtcgacaatatatttcttctcagaaactgctattattttgaaaagaaaacacacgtattataaatttaaaataccgaaatatagcattattaaatcaaaaatagaattaaaaaagaaaattaatcgagaaaagtattaaatgtcatttatttgaatgtgttaattatgaaagaaaaagagtaagtgacgttaaatatacattgactaagctaagttgacacactcaaaaatctgaatattctaataaaatataaataatcccccgcacttcacatagtggcgggggatttattctggcgtcaaaatgcccaaagtatgggggtgactcttaaatcatggcaaagcacctaaaacttgatatggtgccgagccctaacttagcacaatatagttagtatgacaaagtcatctaacataacacatcagagattgcctgatttattccagaccatacagtgatacagttgcacaacgcatgacttttatttagcaataactgctacttctgaaataagttgctttgcatagtctgattgcggatgtttgataatatcttctgtgttattcagttcaacgatttcgccatttttcataactgcaacgcgatcacatatttcattgataacacccatgtcatgtgtgatgaataaataagtgatgccgaagtctaactgtaattgttttaataactcgatgatatctttttgaattgaaacgtctaaagcggacactgcctcgtcgcaaacaatcactttaggttctacagcaagtgctctcgcgatacttacacgctgacgttgcccaccagataattcgtgtggatagcgatataagaaactttgatctaggccaaccttttctaacaacgatacgacagttttaataatgtcatcattatctttgactttcccatgaatgattagtggtcgtttaatcacatcaatgactttaaatcttggattaatagatgcgaatggatcttgaaaaatcatttgtatctcttgtcgtaaagatttcaattcatcatctttaaataaacttaatggtaattcgttataccaaataaagccttctgacacttcctttagaccgacgaccgtcttagctaatgtcgatttccctgaccctgattcaccgacaatgcctaatgtttcgccttttctaatacccaagttaatatcattaactgctcggtataggctgccactcggtgatgtgtaatccacgctcacgcgatcgaattttaataaaatatcattgtttaacggtcttggcggacgcgtttgatgaatatcaggaatcgcatctattaagcgttttgtataggtatgttgtggcgatttaaaaatactttcaaccgtgccactttcaacgacacttccatctttcattacaatcacatcgtcgcaaaattgatacacagcgcctaaatcgtgagtgataaaaataatagatgtttctgtgtactcataaagggacttcattaactgcagtaattgattttgtgtactggcatctaatgccgttgttggttcatctgcgattaaaatttgtggctttaaaatcaatgccattgctatcatgacacgttgacgcataccaccagaaagttcatgtggataagcatcaaattgtcgagttgcatgttttatacctactttttctaaaatgtctattgtcatcgactttgcttcagatttagatacacgtttatgttgaaatagtacttctgtaatttgtttgccaatcgttaatcttggattcaacgaagagagtggatcttgaaaaatcattgaaatatccttacctcgaatttgttgtaacgctgaagttgataaattatttaacgattgcccattaaaaataatttctcctgttaatgtgtgatctggataatctggtagtagccctaaaatagatttagcagtaatactttttcctgatcctgattcaccaacaatacctaggatatgtttttttcgtaattcgaaagagacattttttaccgcttgaactgtagtttcatcataattgaattgtacattcagactgttgacttctaataaatttgacatgatgttgtgcctccctattcacaaatgtgtaaatttattctatacttttgtatatcatagtaatctactcaagattattttacaaggagtgattatcataattacttatttagaatcttttaagtcgttgtatcacaaggcattttacaagtttgtattatcggtattaagcttgccaatatttttatatgcagtgataaagtttttcttttctgctaagagaaaaaatttttacgctaataattctgaaatttcagaaattgaacgagcgttacatcaaaaatataaatatttatcgcagcaaaagtcatccacacaaatacataaagaagcattaaaaatattcaaggcacaaagttctaatacgagttcaaagaatattgaacaagcacatttttcaacatactttgaaaatttattatttcataagttcatcatgatcaaagtaatattggccttgccgatgttcatcttattgactatttatttacagccattagttagatatatttttgagagaattgtcatggctgtgattgtcatcattggtgttattgtcagtgtgtttaccattctgtatttttcaccgcttgatgcggcttatagcatactgggacaaaatgcaacaaaggcacagatacatcaattcaatgtattacatcatcttaacgaaccttattttattcaattgtgggataccatcaagggtgtttttacctttgacttaggtacgacttacaaagggaatgaggttgtgactaaagcagttggcgaaagaattccaattacaataattgtcgcagtattagcgctaattgtggcattaattattgcaataccaattggtattatcagtgcgatgaagcgaaatagttggcttgatatcacgttaatgataattgcattaattggtttatctattccaagtttctggcaagggctattattcattttagcgttctcattgaaattggatattttgccaccatcttatatgccagaacatccaatatcgttgattttacctgtacttgtcattggaacaagtattgctgcttctatcacgcgtatgacaaggtcttctgtacttgaagtaatgcgcagcgattatgttttaactgcttatgcaaaaggattatcgacgacacaagttgttattaaacatattttgaaaaatgccattattccaattgtaacgttagttggtcttctagtggcagagttactaggcggttcagcagtgacggaacaagtatttaacattaatggtatcgggcgttatatcgtccaaaaacaactaatacctgatatcccagcagtcatgggtggggtcgtatatatatcaattgtaatatctttagcaaacttaattattgatatattttatgctttaatcgatccaaaattacgtagtgaaattaacgaaaggaagtgaggcatatggtaaaacttacaacaaagatagcttccttaaaactattcgcaagttatgctatagcaacttatattttagttatattaacgagtgcattaaatctttttaaaggttatgtggccgatacgttctatattgctgaaacattgctaatcgttttaaccatcattttaattatcattttaacaacggaacaaacatggaagcatcatgacttatggcgacgtatcgtcgaagtgttgttattgttgatgacattaacaggcaacgtatttacattattaatgtttgtaagtattagacgttaccaacgtacatcgcaaatacatagttataacgggtgggaatcgtttatacgaaaaactactagacatcgtattgcgattatcgggttacttattttagtctacatgctgacattatcaattgtgtcacaatttacatttgatacgacattggctactaaaaatcagttcaatgcactgttacatggaccgagtctagcctatccgtttggtactgatgatttcggtagagacttatttacacgcgtagttgtaggaacgaagctgacattttcaatttcaattatttcagtagttattgcagttatttttggtgtgttactaggcactatcgcaggttattttaatcatattgataatttaataatgcgaattttagatgtagtgtttgcaattccatcattattgttagcggtggcaattattgcatcatttggagcaagtattccaaatttaattattgctttaagtatcggtaatataccatcatttgcacggacaatgcgtgccagtgttttagaaattaaacgcatggaatatgtagatgcagcacgtatcactggtgaaaacacttggaatatcatatggcgttatattttaccgaatgcgattgcgcctatgattgtacgtttttcattaaatataggtgtggttgtattaacaacaagtagtttaagtttcctaggacttggtgttgcacctgatgtagctgaatggggcaacattttacgtaccggtagtaactacttggaaacgcacagtaatttagctattgtacctggtgtttgtattatgttcgtcgttttagcatttaattttataggtgatgcagtgcgtgatgcactagatccaagaattcattaaaaaggtagggatagatgtgaagaaaatcattagtatcgcaattatagttttagcgttggtattaagtggttgtggtgtccctacgaaatcagaagtggctcaaaagtcatcgaaagttgaagtgaaaggcgagcgaccaacaatacatttcctaggacaagcaagttatgaaaatgatatgaatatcgttaaagatcaattggaaaatgcaggatttaacgtgaagatgaatatccaaccagattatggtagctatcgtacacaacgtcaagccggcaattatgatatccaaattgatgactggatgacagtgtttggtgacccgaactatgctatgacggcattatttagttctacaggatcaaatagtttattgaaagataaacatgtagaccagttgttaaataaagcttctactcaaaatgaagcagatgttaaacaaacatataagcaaattgaagatgaagttgtatttgataaagggtatatggcgcctttatatggatcaaaaaagaatttagtatatgacaataaagtgttagataaaaatagtgttggattgccaaattcacgtgcattaatatggcaacaatttgattacaacaatagtagagaacgagatacgcggccacttgtgatgacacaacaagatggtgaaattcctacattggatccaatacgttcaattgcgccgtcagtatattcaattaatatgaatatgtacacaaggttattattattagatgaaaatgatcatttaacaacgaaaggttcgttaagtcatgattatgctgtgaataaggacaataaagcattttatttcttgttaagagatgatgattattttgcgaaagtggtcaatggacaagcacgtaatactggagagcgtgtatcggctgaagatgttaagttttctttagatagagcacgtgataaaaagtctgtgcctaacaataatacttacaatatgcacaaacatataaatgacatcaagatattaaaagatgaggacatcgatcagttgcgtaaagagaaagacaaggacgataaatcaatctatgataagttgattaaagcttataacgtcaaatcgttaacgacagatggtcaaaaagtaaataataaagacggtatttatcaaattgttaaaattacgacagatcaatcgatgcctcgagaggtaaattacttaacacactcttcggcaggcattttatctaaaaaatttgttaatcaagtaaatcaagaatatccaaaaggatatggggatagcagtacaattcctgcaaattcagatgggaaaaatgcgctgtatgcaagtggcgcatacattatgacacagaaaaatgcatatcaagcaacgtttcaacgtaatccaggattcaacgaaacagaaaaaggtagttatggaccagctaaaattaaaaatattacattgaagtttaatggtgacccgaataatgcattgtcagaacttagaaatcattcaattgatatgttggcagatgtgaatcaaaaacattttgatttaattaagtcggataaaaatttaagcattattcgcaaaaatggacgcaagtcagtctttttaatgctaaatattaaaaaaggtatatttaagacgcatccaaacttgagacaagcagtagttaatgcgatagatcaggatcaatttattaagttttatcgtggcgataaatttaaaattgcatcaccgattacaccacttgtcgatactggtaacgagcaacgtcaagatttagaaaaagtagaaaaagccatcaatcaataatgttttaaatatttaacagaaagtaggaggatatagtatggtcattaacttaaatgacaaacagacaaaaacatctaaagaagggttaatttccgtatcacatcctcttgcggctaaaattggtaaggatgtattagatcaaggtggcaacgccatggatgcagtgattgcaattcaactggcgttgaatgtggtagaaccatttgcatcaggtattggtggtggcgggtatttgctatattatgagcaaagtactggcagtataactgcgtttgatgcgcgtgagacagcccctgcacatgtagataaacaattttatctagatgattcaggcgaatataaatcattttttgatatgactacacatggtaaaactgtcgctgtgccagcaattccaaagctgtttgattatattcacaagcgttatgctaagttgtcattggaagatttaattaatcctgcaattgaactagctattgaaggtcatgcagccaattgggctactgaaaaatattcgcgccagcaacacgcacgattgacaaagtattatgaaacggcacaagtatttacgcatgaaaatcaatattggcgtgaaggtgattggattgtacaacccgaattaggtaagacatttcaaatattaagagaacaagggtttaatgcattttataaaggtgacattgcgaaacaattagtcaatgttgtcaaagcatgtggtgggacaatcactttagaggatctagccaaatatgacattcagattaaagcgccaatcagtgcaacatttaaagactatgacatttattcaatgggaccatctagttctggcggtatcacggtaattcaaatattgaagttattagaacatgtcgatttaccatctatgggtccaagatctgttgattacttgcatcatttgatacaagcgatgcatttagcatatagtgatcgtgcgcaatatttggcggatgataattttcatgaggtgcctgtacagtcattaattgatgacaattatttaaaagcacgcagtacgctcattgatagcaataaagcaaatattgatatagagcatggtgttgtgtctgattgcattagtcatacagatgttgaagaaaatcataccgaaacaactcatttttgtgtgattgataaggaaggtaatattgcttcatttacgacatcaatcggtatgatttacggatcgggtatcacgattccaggctacggcgtgttattgaatacgacaatggatggctttgatgtagtagatggtggtattaacgaaattgcaccatataaacgaccactaagtaacatggctccaacgattgtgatgtatcacgggaagccaatattaacagtaggtgcacctggtgccataagtatcattgctagtgttgcgcaaacattaatcaatgtattagtgtttggcatggatattcagcaggctatagatgaacctagagtttatagtagccatcctaatcgcattgaatgggagcctcaattttcacaatctacaatattagcattgattgcacgtggacatgcaatggaacataaaccagatgcctatattggagatgtacatggactacatgttgacttgaatacacgtgacgcatcgggaggtgctgatgatacgagggaaggtacagtgatgggtggtgaggtattatcaattagaaaacaaccattacttagtcccgaaatatacgataatgacacccatcgtgtatatttcaatgatgtgcagttacctttattggcagatcaagtgcgatggatgcatgacaaatattgggttgatgaaagtgtcgttagaatcatcttctctgaagttagtgcacatattgaagatttaagaagttatgaaaacgcaggagaaaattatatagatattgcctggttagcacgaaagaaaggttatcaagtggcattgaaagatgatggtttatacttaactgatgatacatatacttcagtgaaacggaacacaaatgcatactatagatatgatcgagatagtatcacaagatagtttatacgcttgatatgaagtttgtagtggataagggcttttgttgaatgaaaggattcgattttgaactttagcgtgacgcttgagtgtagtaatgttgaagttgttataagaaacgctagtcgcctttgtaaaatataaaacgccccacaaattcgtttttgatgtacaccacaatagttagtctaaaatctaacttgatgtgattcggtacaattaaatgaatgatgtgaggcgtttttataatgtgtgattttagtatgttaaacgataataaatgatttggttatttctataattacatcataagtattaatgttcacttaatttattataagtaaggctttctttgtatataatttggtcttttccaggacttgaaaaataaaaataaagtttctgatcttgatgattattgccttttaaatcactcattccctttaattccacctttgttgatgcatttctgggaatattatatctacgttttaattgtttaacgtttggattatcattcgacaacttaccagataaattataataatcagtggtaggatcatgtgtgactttcaaatcattgctatttaaaatgcttgttaaatcaccactttgaatcaaaaattgattgttttcgattttttgtttcagcgcgggatcttttacgtcttttgtgaaaacgattttattattaactacttttactggataacttttgtatgtcgagtcagtagcattttttctatcgtttgtagttgtgtcatattcaccagttattttatgtgtgttcttatctacctttaacaacatacggtcttcttttaaaagctcatctgatccaacaactgaataagaggattctatataccatgtgtcttgatcattattttcataatggggattatcgtgaccatcaatttcataaagcgtttctaagtttttaataggatacgtacttagtacttttttaagaccatctttcaaatgaatttgttcccacttcattgccaaaaacataccgccactgactacaattgaaataataataattgctgctaagtttaaccagaaaattttatgtgctttcatacattcacaccttttcttaaaatacttaattaacactataataatatattttaaaaatatttacatcagtattaaagtgaatatcaaactttaaatgtgtggaaataataggtatttataaaaaagtaggaaatgcatacaattaaaaactgtgtgacgtttgagacgtcacacagtgtaactaaaaatttaaaaaattgttgctaatttttcagcattattaatactagttgctttaatttcttcagtcttatgaggttcagcattgtgtccttcaataatgattgtttcatatgatggcacacctaagaatgtcataattgttcttaaataacggtcacccatttcaaaatcagcagcaggtccttcagtataatatccaccacgtgattgaatgtgtaatacttttttgtcagttagtaaaccttgtggtccttcagcagaatatttaaaagttttacctgcaattgaaatagcatcaatatatgctttaactacaggtgggaaagaaaggttccacataggcgttacaaatacatatttatctgcacttaaaaattcttctaaaatgtcactcaatcttgaaactttcatttgttcatcatcagttaacgtttcgccattactcatttttccccaaccagttaatacatctttgtcaataactggaatataagtttcaaataaatcaatatgtttcacttcatcatcaggatgttgttgttgatatgtttcgataaatgctttaccagccgccatagaatttgataccagttcattaaaagggtgtgctgtaatatataatacttttgccatttgaaaattctcctctgtttctgttattttcttgagtataattattatactagatataaaatttaatatcaataaaaatattcaaattaccatcattttcttcatctatatttggcagtactactaaagtatgagtgcatttaattatgaaatagttgatttagaatatatacttaatacccaaaatatatgaaggatggatgccactatgacaaagcgaccaaaacgtattttggcaacaattatcatttttctttcactattatttacgattatttatatagatgacattcaaaaatggtttaaccaatataccgataaattgacacaaaatcataaaggacaaggacactcaaaatgggaagacttttttagagggagtcggattactgagacttttggtaaatatcaacattcaccatttgatggtaagcattatggcattgattttgcattgccaaaaggtacaccaattaaagcgccgacgaatggtaaagtaacacgtatctttaataatgaattgggcggcaaggtattacagattgccgaagacaatggagaatatcaccagtggtatctacacttagacaaatataatgtcaaagtaggtgatcgagtcaaagcaggtgatattattgcatattcaggcaatacaggtaaacaaacgacaggcgcacatttacattttcaaagaatgaagggtggcgtaggtaatgcatatgcagaagatccaaaaccgtttatcgatcagttacctgatggggaacgtagcctatatgatttgtagttatagaagggtgcccgcagtctaaaaaattaagcaatcattgtgtgagtatgatacttacataatggttgcttttttcaatgaaaatcgtaatgctaagtcatacttgtttgatttagatattacttaaaatgtaagacaaggttgttagcattggcagtgaaatatcgcacataaaaaacattattgtcacactagaaaatagttgtgcactatatcaattttctgtataaaagtttaattctgacagtaatgtaaacgtttacaatttatgattgacattaataatgactgaatatatgatttatgtaagtatttgtgcaaacgttttcacaaagtgtattgcacaatcaaactgtaaacaaagtatgggaggcataacatggcagaactaaagttagagcatattaaaaagacgtatgataacaacaatactgtagtgaaagattttaatctacatattactgacaaagaattcattgtatttgttggaccatcgggatgtggtaaatcaacaacattacgaatggttgctggactagagtctatcacatctggagatttttatattgatggggaacgcatgaacgatgttgaaccaaagaatagagatattgcgatggtatttcaaaactatgcattatatccacatatgactgtttttgaaaatatggcatttgggctaaagctacgtaaagtaaataaaaaagagattgaacaaaaagttaatgaagcagctgaaatattaggattaactgagtatcttggtcgtaaaccaaaagcgttatctggcggacagcgtcaacgtgttgctttgggcagagctattgttagggatgcgaaagtctttttaatggatgaaccattatcgaatcttgatgcgaagcttcgagtacaaatgcgcacagaaatattgaaattacataagcgacttaatactacgacaatttatgttacacatgatcaaactgaagcattgacgatggctagtcgaattgttgttttgaaagatggcgacattatgcaagtcggcacacctagagaaatatatgatgcccctaattgcatatttgtggcgcaatttatcggctcaccagcaatgaatatgttgaatgctacagttgaaatggacggattgaaggtaggaacacaccattttaaattacataataaaaaatttgaaaagttaaaagctgctggctacttagacaaggaaattattttaggtattcgagctgaagacattcatgaagaaccaatatttattcaaacttctccagagacacaatttgaatctgaagtagttgtatccgaactgttaggttcagaaattatggtacatagcacattccaaggaatggaattgatttctaaattagattcaagaactcaagtgatggcgaacgacaagattacactagcatttgatatgaataagtgtcacttttttgatgaaaaaacaggaaatcgtatcgtctaagggggagtattcatgtctaaaattttaaaatgtatcacgttagccgtggtaatgttattaatcgtaactgcatgtggccctaatcgttcgaaagaagatattgataaagcattgaataaagataattctaaagacaagcctaaccaacttacgatgtgggtggatggcgacaagcaaatggcgttttataaaaaaattacggatcaatatactaaaaaaactggcatcaaagtaaagcttgtaaatattggtcaaaatgatcaactagaaaatatttcgctagacgctcctgcaggaaaaggtccagatatctttttcttagcacatgataatactggaagtgcctatctacaaggcttagctgctgaaatcaaattatcaaaagatgagttgaaaggtttcaataagcaagcacttaaagcgatgaattatgacaataagcaactagcattgccagctatcgttgaaacaaccgcacttttttataataaaaaattagtgaaaaatgcaccgcaaacgttagaagaagttgaagctaatgctgccaaactaactgatagtaaaaagaaacaatacggtatgttatttgatgctaaaaatttctattttaattatccgtttttattcggcaatgatgattatattttcaagaaaaatggcagtgaatatgatattcatcagctaggactaaattcaaaacatgtcgtcaagaatgctgaacgattacaaaaatggtacgacaaagggtatcttcctaaggcagcaacacatgatgtcatgattggtctttttaaagaaggaaaagtaggacaatttgtcactggaccgtggaacattaatgaatatcaagaaacgtttggtaaagatttaggagtaacaacattacctacagatggtggcaaacctatgaaaccatttctaggtgtacgtggttggtatttatctgaatatagtaaacataagtattgggctaaagatttaatgctgtatatcactagtaaagatacattacaaaaatatacagatgaaatgagcgaaattactggacgtgttgacgtgaaatcatctaatccaaatttaaaagtgtttgaaaagcaagcacgtcatgctgaaccgatgcctaatattcctgaaatgcgacaagtttgggaaccgatgggcaatgcaagcatatttatttcaaatggtaagaatcctaaacaagcgttagatgaggcgacgaatgatataacgcaaaatattaagattcttcatccatcacaaaatgataagaaaggagattagttatgacgaaacgtaaccctaaattagcggcattattatctgttatacctggtttgggacagttttataataaaagacccattaaagggacgatattttttatctttttcatcagttttatttctgttttttatagctttttaaatattggtttttggggattgttcacattagggacagtacctaagttagacgattctcgtgtcttacttgcacaaggtattatttctatcttactcgttgctttcgcaatcatgctatatatcattaatattttagatgcatatcgtaatgctgaacgatttaatcgcaatgaggaaataaaggatccgaaggcgcgtatggtggcaacatgggacaagacgttcccatacttactaatctcaccaggtacattcttattgatatttgtagttgtatttccattaatatttatgtttggagtagcatttacaaattacaatttatacaacgcgcctccgagacacacattagaatgggttggtttagataactttaaaacgttattcacaattggcgtttggcgtaaaacatttttcagtgttattacttggacattagtatggacgcttgttgcaacgacacttcaaattgcattagggctgtttttggcaattattgtaaatcaccctgtcgtcaaaggtaagaaatttatccgtactgtgttaatcctaccttgggctgtaccatcatttgtgacaattttaatatttgtagcgttatttaatgatgaatttggtgcgataaataatgatattttgcaacctttattaggtgtagcaccagcatggttaagtgatccgttttgggcaaaagtggcattaatcggcattcaagtatggcttggattcccatttgtctttgcactgttcactggagtactgcaaagtatttcatcagattggtacgaagcagcagatatggatggtgcgtctagttggcaaaagtttagaaacatcacattcccgcatgtcatttacgccacagcgccattgttaattatgcaatatgcaggtaatttcaataattttaatcttatttatctatttaataaaggcggtccaccagtgtcagggcagaatgctggtagtacagatatcttgatatcttgggtgtataatctgacatttgagtttaacaacttcaacatgggtgcagttgtgtcattaattattggatttattgttgctattgtcgcatttattcaattcagacgtacaagtacgtttaaagatgagggaggtttataagatgacaaagaagaaaaacatattaaaagcaatcggtatttacagttttatagcgatgatgtttgtcatcattttatatccactactgtggacatttggcatttcccttaatccaggtacgaacttgtatggtgccaaaatgataccagacaatgcaacatttaaaaattatgcattcttactattcgatgacagtagtcaatacctgacttggtataaaaatacgcttatcgtagcatctgcaaatgcactgtttagtgtgatatttgtcacgttaacagcatatgctttttctagatatcgctttgttggtcgtaaatacgggctgattacatttttgattttacaaatgttccctgtattaatggcaatggtcgcaatctatattttgctaaatacaattggattattagattctttatttggactaacactggtatatattggtggatcaataccgatgaatgcctttttagtgaaaggttacttcgatacgattccaaaagaacttgatgaatctgccaaaattgatggtgcagggcatatgcgtattttcttacaaattatgcttccattagctaagccgattttagcagttgttgctttgttcaattttatggggccatttatggactttatattacctaaaatactattaagaagtcctgaaaaattcacattagcagttggattgttcaactttattaatgataagtatgcaaataatttcacagtgtttgcagcaggggcaattatgattgcagtacctatagcaatcgtattcttgttcttgcaacgctatttagtatcaggtttaacaacaggtgcgacaaaaggttagtttgaaattaggagtggggcagaattgataaagaaccactaatgacgataaagattaaaaggaggacgttatgatgacgattaaagttggaatcattgggtgtggtggtattgcgaatggcaagcacatgccaagtttacaaaaagttgaaaatgttgaaatgatcgcattttgtgacgtagacatttcgaaagcagcgagtgcggcagaagcatacggaactgacaatgcaaaggtttatgatgattacaaagcattgttaaaagatgacacgattgatgttatccatgtttgtacgccaaatgactcgcattgtgaaattactgtagcagggttgcatgctggtaaacatgtgatgtgtgaaaaaccaatggctaaaacgacagcagaagctcaaaaaatgatagatacagctaaatcaacaggtaaaaaattaacaataggttatcaaaatcgtttccgagcagatagtcaatttttacatcaagcagcgcaacgtggcgacttaggagacatttacttcggaaaggcacatgccattcgtcgtcgagcagtaccaacatggggtgtctttctagacgaagaagctcaaggtggaggaccattaatcgatatcggtacacacgctttagatttaacgttatggatgatggataattatgaaccagaatcagtgatgggttcaacattccataaattaaataaacagcatcatgcggcaaacgcttggggttcatggaatccagatgaatttacagttgaagattctgcgtttggatttattaaaatgaagaatggagcgacgatcatgttagaatccgcttgggcgattaattctttagaagtggatgaggcaaaatgttcattatcaggaactaaagcaggtgctgatatgaaagatggtctacgtattcatggtgaagacatgggtacactttataccaaacacgttgaattggaaaacaaaggcgtcgacttttatgaaggtaatgaagtggatgaagctgaagaagaagcaaaagcttggattgatgcagttgtaaatgatactgaaccagttgtgaaaccggaacaagcaatggtagttacaaaaattcttgaagcgatttatcagtctgcaaaatcaggcaaagcaatttactttgaataacatcatacggtaaggaggcacatcatgacaaaattaaaagttggtgtgataggtgttggtggtattgcacaagaccgtcatattccagcattgctgaaactcaaagacacagtctcattagttgcagtacaagatattaatacagtgcagatgattgatgttgcgaagcgctttaatatacctcatgcagttgagacacctagcgagctgtttaaacttgttgatgcggtggtcatttgtacacctaataaattccatgctgatctttctatagaagcattgaaccatggtgtccatgtattgtgtgaaaagccaatggcgatgacgacggaagagtgtgatcgcatgattgaagcggctaataaaaatcacaaattattaactgtcgcatatcattatcgtcacacagatgtggcaattactgctaaaaaagcaattgaatcaggtgtggttggtaaacctttagtagcacgtgtacaagcgatgcgtaggcgtaaagtgcctggctggggtgtttttaccaataaagcgttgcaaggtggcggtagtttaatcgattatggttgccacttgttagacttatctttgtggctactaggtaaagatatggtgccgcatgaagtgctaggaaaaacatataatcaattgagcaaacaaccgaatcaaattaatgattggggaacatttgatcatactaaatttgatgtcgatgatcatgttactagttatatgacatttgccaatcgagcaagcatgcagtttgaatgttcgtggtctgcaaatatcaaagaagataaggttcacgttagtttatcaggagaagatggcggtatcaatttatttccatttgaaatatatgagccccgctttggaactatttttgaaagcaaagctaatgttgagcataacgaagacattgctggtgagagacaggcgcgtaactttgtcaatgcgtgtttagggatagaagagattgtggtgaaaccggaagaagcacgcaatgtaaatgcccttatagaagcgatttatcgtagcgatcttgataacaagagcatacaactttaatgattatcatatatgatacaaaattctcaatataaaaagaaggagtgcttttcaatgaaaataggtgtattttcagtattattttacgataaaaattttgaagatatgttagattatgtctcagaatctggattggatatgattgaagttggaacaggtggtaacccaggagataaattttgtaagttagatgagttgttagaaaatgaagacaagcgccaagcatttatgaagtcaatcacagacagaggcttacaaataagtggtttcagttgtcataacaatccaatttctccagatccgatagaagcgaaagaagccgatgaaacgttacgtaaaacaatccgtttagcaaatctattagacgtgccagttgttaatacattttctggcattgcaggatcagatgataccgctaaaaagcctaattggcctgttacaccttggccaacagcctactctgaaatttatgattatcagtggaatgaaaagttgataccatattggcaagatttagctgagtttgcaaaagagcaagatgtaaaaattgccatagagttgcatgcaggatttttagtgcatacaccatatacaatgttgaagttacgtgaggctacaaatgaatatatcggtgctaacttagatcctagtcatctatggtggcaaggtattgacccaattgctgcgattcgcatattaggccaagcaaatgcaattcatcacttccatgctaaagatacgtatattaatcaagaaaatgtaaatatgtatggtctaactgatatgcaaccatatggtaacgttgcgacaagagcatggacattccgtacagttggttatggacatagtccatatgtatgggcagatatcataagtcaacttattattaatggatatgattatgtattaagtattgaacatgaagatcctattatgtcagtagaagaaggtttccaaaaagcttgtcaaactttgaaatctgttaatatttacgacaagccagcagacatgtggtgggcataatacgaactcgaggttagtctgaagtttgtctgaagtaagactggtggcagtgttgaataaatgcatatgtcgccaagccattgccaaaaatttcacaccttaaatcatgtcattgtttgtaaagaaggtgtactttatataagtgtttagcgatggtcatacccattcacagtaacaatcctcaccattgaaaagagtatataaccttttcgatagtgaggtatatgataataaaaaaagcctgttgtcacaatggtcatagacacgacatactttaaaggcttctgaatataatatttcagaacgcactttaaagatggacgtcgatgtcgactaatgtgatgacaggctttcatctttttaaatattcattaatttctcttcttgtttaatacgtacatataagaaatacgcatacggtactaataaaatagttgtatatgttgcgtgtgttaataataatacaccgattaattcaggaatgatgtttaagaagtaatttgggtgttttgtaattttatataatccagatttaataataggatggttaggtaaaatgaataattttaatgtccaaataccacctaaagttttaataaccataaataacatgatataagcaaagattaatataactaagccaataccatttgcaaagctaaatgtatctttattaataaatgcctctacaccagccaatacataaattaaaacgtgtgttattgctaaaaacttcgaatttttaacgccatattcaactgcaccgtctgcttttaattgttttgagtgattaatagatatctttaagctgacaagtctgatacagaaaaagataagtaatatagatagaatcatgatgtcctccgtcattatgtcatatgtataagcgttgattttgacaacataaagtattttatagataaaacttgtcaaatactattaactatttattaattttagtacataaatatgtttctaagtatgtgtttatgttcagtattttggataatttaataattttaaggatattaagcgcttacaccgacgtgatatatttggcttaacgaaaatgattgaggtgacagagatgaacttttttgatatccataagattccgaacaaaggcattccattatcggtacaacgtaaattatggcttagaaacttcatgcaagctttctttgtagtgttctttgtttatatggctatgtatttaattcgaaacaactttaaggcggcccaaccgtttttaaaagaggaaattggattatctacattagaacttggttatatcggattagcatttagtatcacgtacggtttagggaaaacattacttggatattttgtcgatggacgtaacacaaaacgtattatctcgttcttacttatcttatctgcgattacagttttaattatgggatttgttttaagttactttggttctgtaatgggattattaattgtactttggggacttaacggggtgttccaatcagttggtggacctgcaagttattcaacgatttcaagatgggcgccaagaacgaaacgtggccgatacttaggattttggaatacatcacataatatcggtggtgccattgcaggtggtgttgcactttggggtgctaatgtattcttccatggaaatgttatagggatgttcattttcccatcggtgattgcattacttattggtatcgcaacattatttatcggaaaagatgatccagaagaattaggatggaatcgtgctgaagaaatttgggaagagccggtcgataaagaaaatattgattctcaaggtatgacgaaatgggagatctttaaaaaatatatcctgggaaatcctgttatatggattctatgtgtttcaaacgtctttgtatacattgtacgaatcggtattgataactgggcaccgttatatgtgtcagagcatttacactttagtaaaggcgatgcagttaatacgatattctactttgaaattggtgcattagttgcaagtttattatggggctacgtatcagacttattaaaaggtcgtcgtgcaattgtagctattggctgtatgtttatgattacatttgttgtcttattctacacaaatgctacaagtgtcatgatggttaacatttcattgtttgcattaggtgcgttaatctttggtccgcaattattaattggtgtatcattgactggttttgttcctaaaaatgccatcagtgtagcaaacggaatgacaggttcattcgcgtatctattcggtgactcaatggcgaaagttggtttggcggctattgctgatccaacacgtaacggtttaaacatctttggatatacattaagtggatggacagatgttttcatcgtcttctatgttgcattattcctaggcatgattctattaggaatcgttgctttctatgaagaaaagaaaattagaagtttaaaaatttaatataaatcggattaaaagtatcgccaatctattgcaatatagttggcaatcctgccccgacggcatgtgcgtgaagagatgaaagatactgcttctacccttgcaaatatatcatctctatgtctcggggcagatcataattccctgttatgaagtatccttatttgcccgacttagggtgactcaatgaatttactccttacaataaagacatatagcggtgtcaatattgtagggagtattgttttatatttaaactctctaaaaagcggactgaaagaaaagtgaaaacttctctatcagtccgctttttcatagaacaaaatgtaggcgccataatcattagttatgtgctaatctattttgcttgcttacaataatcacttggcgacatttgtaaatattttttaaaatgatagctaaacattttatactctgaaaagcctactttgtctgcaatttcatagtgtttgtaatgtcgatctaacaattgcagagattgtaaaatacgatagcgatttaaataatcgacaattgtaataccaacatgatctttaaatgttcgcatcgcatacgattcactaacatcgatatgttgaattaaatctgaaacagtcactttcgtttgataagattgcttaatttgatcaacaatttgatttacataataatcatcgtattctacttttaataatggttggaaggcatcatgacaagatgctaagctacggccgttctgtgattgttgctctaataaggtacggacaagtcttcctaaaataacttctaattgtgcatggtccactggttttaataaataatcaagaacatgatgttgaataccggctttcatatattcaaagtcatcgtaactcgataatatgatgacattacaatctagatgcgcaatatcattgagtaaatcgacgccatttttacgtggcatacgaatatcagtaattactaattctggctgatgttgttgaattagtgataatgcttcaacaccatctttagcagtgtatattgtattgaaatgatagtctccccaaggaatgatttgctttaaaccttctcgaataattcgttcatcatcacaaataactaccttaaacatctacattcccccttgaaagtggtattttataacaaattaacgtaccttgattacgctttgaaaaaatatggagtcgtgcatgtgaaccatattgaatcattgctttattgtgtaaatgatttaatcccaaatgcttagtatcaaatacatcattattaagagattggcgtacatattgcaggcgagatgacgacatcccaataccattgtcgcaaactaaaacatgtaaattctgacgtgccaatgtcaggcgtatagtaatatccaatgactcagtatctctaccatgtttaatagcattttctatgagtggttgaagcatcattttaccaattgtctggtgacgcgcttcttcagaactttcgatatggagcttaatcatgtcatcaaaacggatgttttgtatcgcaacatactgttcaatgtagttcaactcttcgtttaattccactgtatgtgagtttgtacgtaatgagtaacgtaacatttgcgataattgttggaccacagtttgtgctaatttcggagataacgtaattaaatattgtattgtttgcatcgtattgaataggaaatgaggttggaattggcgttctatttcctttaactgaatatcacgcaagcgacgttctgtatgctcgatagaatggatcagttgctcatttgattcaaataaatcgtaaatataattattaatttcttctagttcactgttgttttttaaaggtgtatatgtacctagatgacgatttttggcatagtaaattttttgaataatcgtttcgatatcttttgtttgtcgtttagccatattatctgcgctaatgaaaccaaatattactagtaaaacaagaactacggccataacaattaacaacgtgataccatcttcaatgttttcatgtatatctttataaataatgagacgatggtcagcatggtttaattttacagattcattcataaatccgaattgttgtggtctatacttttcacctatagtaaaacggtcatcgttggcgtataaaatattgtcatattgatcaacgataagtgcgaattgtcggctatctttcttaatttcacttaaacgtggggtgttagccatataaattttaagcatatatgtactatttttgaatttaagctgatgcgttgaaaataaatacatatttttagtgtttaaatgttcataattattggttataaactgatttggtccagataattcataataaagtgttgcgggctgttggtgtattaattttaataatccacgttttgtagcggtaacatcatgatgatttgttaaatcgagctcttgaaacgaattattatgctgtgtaataaatgtctgaatctgcttttcagtgtgatgtaaagatgactgactttcatcaacatgttgatgaatcgtacgatgctcaatccaaatatagatggcatagaagcttactagtccaataataatgactaaaaataccggaaaaatagtagacgcaaataacgatcgtctcaattgatgtctataaggtttgtatgccgtcattgaatcatctccaaaaatttatgatgtggaatgtccggtaatttagatttcggtattaaaggtatgttcttaagattttcgatagactgatcgctttgttcactaacatcctttcgaattgacttggcatcgaactctgcaactaatcgttgttgtactgagcggcttgttaaatattgcactaactttttacgcttaggatgagggtgtgcatttttaactaaagcaataccatcaacatttaacattgttccttcaattggataaacgattgatacaggataacctttgtttttccatgtgcgtgcatcttgttcgtagcttagacctgcgtaatatttaccttttgcaacatcttcaatgactttagacgtctttgacagttgcatcgcatggttttggaattgatgcacatcacttactcgatgatgcatgctataaatagcgcgcatatgttgatagcctgtcgttgttgtatttggatttgagtacgcaattttacctttaagtataggttgtaataaatcttgataacctcgaatcttaatatctccttgtaaatctgaattcactactataactgttggcattaatagaaaactagtaacatatttattgttcgagcgataatcctctaattgctgtgttacagatgtatcttgatagggaacaaaatcttctggatgatcaattgtttctgataacacaccacccataaagacgtcaccacgctccgaaaaatcttcgttatgcaagtttgaaagcagtacttgagtagatccatgtttgatttcaattttgacatgctcttgtttttcaaattcatttaaaattggacgaatcaagtttgattgatacggagaataaactgttaatacatttttatctgattcagagtgacgcgtattagcgcatgctgataaaaaaatgagaaataatagcaagatataaatttttgatttcatgatatcccatcaattctatgtatattttaatacaataattttagcaataaatgacgcataagtaatgttaaatatttagaaatgtttaaagatgacttgttaagacgttgcaaatgttgtgatagcacataatttttgtttgtcaagatgacttaccgaggttgtaaaatcaaactgttatattttatttgtagctgttatataaaaattggcaagatattgaacggttcaaaagtatatttttacgtcaataaaagtatttaatccagtctcttcatatataaaagtaaatctttctaagtgttgatttaacgcttatcaacaatcattttttataaacaaatatatactcctaaattaacttttaaagcaatgaaaatagtgaacattataactgttgtgtaacagaatgcaattagcatattactgttacacaaattagtacagtttctatgttttgacatacatttgatgaaaattgtacataatttatgtgaaaaaaatcacaacaaacatgctacaatgactatgaaaacgttaacatagcatttcaaattcacaacattatacagatggaggcgtttagtatgttagaaacaaataaaaatcatgcaacagcttggcaaggatttaaaaatggaagatggaacagacacgtagatgtaagagagtttatccaattaaactacactctttatgaaggtaatgattcatttttagcaggaccaacagaagcaacttctaaactttgggaacaagtaatgcagttatcgaaagaagaacgtgaacgtggcggcatgtgggatatggacacgaaagtagcttcaacaatcacatctcatgatgctggttatttagacaaagatttagaaacaattgtaggtgtacaaactgaaaagccattcaaacgttcaatgcaaccattcggtggtattcgtatggcgaaagcagcttgtgaagcttacggttacgaattagacgaagaaactgaaaaaatctttacagattatcgtaaaacacataaccaaggtgtattcgatgcatattctagagaaatgttgaactgccgtaaagcaggtgtaatcactggtttacctgatgcatacggacgtggacgtattatcggtgactatcgtcgtgtagctttatatggtgtagatttcttaatggaagaaaaaatgcacgacttcaacacgatgtctacagaaatgtcagaagatgtaattcgtttacgtgaagaattatcagaacaatatcgtgcattaaaagaattaaaagaacttggacaaaaatatggtttcgatttaagccgtccagcagaaaacttcaaagaagcagttcaatggttatacttagcataccttgctgcaattaaagaacaaaacggtgcagcaatgagtttaggtcgtacatcaacattcttagatatctatgctgaacgtgaccttaaagcaggcgttattactgaaagcgaagttcaagaaattattgaccacttcatcatgaaattacgtattgttaaatttgctcgtacacctgattacaatgaattattctctggagacccaacttgggtaactgaatctatcggtggtgtaggtattgacggacgtccacttgttacgaaaaactcattccgtttcttacactcattagataacttaggtccagctccagaaccaaacttaacagtattatggtcagtacgtttacctgacaacttcaaaacatactgtgcaaaaatgagtattaaaacaagttctatccaatatgaaaatgatgacattatgcgtgaaagctatggcgatgactatggtatcgcatgttgtgtatcagcgatgacaattggtaaacaaatgcaattcttcggtgcacgtgcgaacttagctaaaacattactttacgctatcaatggtggtaaagatgaaaaatctggtgcacaagttggtccaaacttcgaaggtattaacagcgaagtattagaatatgacgaagtattcaagaaatttgatcaaatgatggattggctagcaggtgtttacattaactcattaaatgttattcactacatgcacgataaatacagctatgaacgtattgaaatggcattacatgatacagaaattgtacgtacaatggcaacaggtatcgctggtttatcagtagcagctgactcattatctgcaattaaatatgcacaagttaaaccaattcgtaacgaagaaggtcttgtagtagactttgaaatcgaaggcgacttccctaaatacggtaacaatgacgaccgtgtagatgatatcgcagttgatttagtagaacgctttatgactaaattacgtagtcataaaacatatcgtgattcagaacatacaatgagtgtattaacaattacttcaaacgttgtatacggtaagaaaactggtaacacaccagacggacgtaaagctggcgaaccatttgcaccaggtgcaaacccaatgcatggccgtgaccaaaaaggtgcattatcttcattaagttctgtagctaagatcccttacgattgctgtaaagatggtatttcaaatacattcagtatcgtaccaaaatcattaggtaaagaaccagaagatcaaaaccgtaacttaactagtatgttagatggttacgcaatgcaatgtggtcaccacttaaatattaacgtatttaaccgtgaaacattaatagatgcaatggaacatccagaagaatatccacagttaacaatccgtgtatctggttacgctgttaacttcattaaattaacacgtgaacaacaattagatgtaatttctcgtacattccatgaaagtatgtaacaaaatttaaggtgggagcactatgcttaagggacacttacattctgtcgaaagtttaggtactgtcgatggaccgggattaagatatatattatttacacaaggatgcttacttagatgcttgtattgccacaatccagatacttggaaaattagtgagccatcaagagaagtcacagttgatgaaatggtgaatgaaatattaccatacaaaccatactttgatgcatcgggtggcggtgtaacagtcagtggtggcgaaccattgttacaaatgccattcttagaaaaattatttgcggaattaaaagaaaatggtgtgcacacttgcttagacacatcggctggatgtgctaatgatacaaaagcatttcaaaggcattttgaagaattacaaaaacatacagacttgatattattagatataaaacatattgataatgacaaacatattagattgacaggaaagcctaatacacacatccttaacttcgcgcgcaaactgtcagatatgaaacaacctgtatggattcgacatgtccttgtgcctggttattctgatgataaagacgatttaattaaactaggggaattcattaattctcttgataacgtcgaaaagtttgaaattctgccatatcatcagttaggtgttcataagtggaaaacattgggcattgcatatgaattagaagatgtcgaagcgcccgatgatgaagctgttaaagcagcctaccgttatgttaacttcaaagggaaaattcccgttgaattataaatacaattcagaccgaaaagaaagcatatgcaacttcaagagtgaaggggcatatgcttctttttcaattgagtatagagtattagcaagacgtagtaagtatatgagacaacttctacaatggttgaaggaagacgtttttgtaagtagctatgctgataaagaatgtgatgtcttgttaaaggtggggttccaatatcatcatttagctgatgttgaatgggttattatttgctacttgcatatgaatatgagtcttttcaaatttttattgaccctgagtaatgaaaaatattaagatgaaacttaatattaaagcaatgcggagcgtgattatgaagagaattagtaaagatatatgggcagtatttaaattactgtatcaaaataaagggcgttttagcattaatgccttactattgcagttaatcatgatttttattagtagtacatacttaattttactatttaatatgatgttaaaagtagctgggcaaagccaacttacgattaacaattggacggaaatcgttagtcatcccgccagtgtgatacttcttattatattcatattaagtgttgcctttctgatttatgtagagttttcattgttagtttatatggtttatgccggctttgatcgacagattattacatttaaatccatttttaaaaatgcctttgtaaatgtgcgtaaactcataggtgtaccagttattttctttgttatttatttaatgttaatgatacccattgccaacctaggactaagttcagtattaacaaaaaatatttacatacctaaatttttaacggaagaacttatgaaaacgacgaaaggtataatcatttacggtacctttatgattgctgtatttatattaaactttaaattaatatttaccttaccgttaacgattttaaaccgtcagtcgttatttaaaaatatgagactaagttggcaaattacgaagcgaaataagtttcgacttgttatagaaatagttatattggaactcatcattggtgcgattttaacattaattatttcaggagcaacatatcttgccatttgtgtagatgaagaaggagataagtttttagtctcatcaattttatttgttgtattgaaaagcgcattgttcttctattatttatttacgaaattatcattaatcagtgtgttagtactgcacttaaaacaagagaatgtattagaccaaccgggcttagaatttaaatacccaaaaccgaaacggaagtctaggttctttataatttcaatggtacttgcagtgacatgttttatcggttataacatgtacttactttacaataatactatcaatacaaatatctccattattggccatcgtggtttcgaagataaaggcgttgaaaattctattccgtcattgaaagctgctgcaaaagcgaatgtcgaatacgttgagttagatacaattatgacgaaagataaacaatttgttgttagtcatgataacaatttgaaacgtttaacaggtgttaataaaaatatttctgaatctaatttcaaagatgtcgtcggtttgaaaatgcgtcaaaatggacatgaagcaaaacttgtatccttagacgaatttattgaaacggctaaacaatcaaatgtgaagctactagtagagttaaagccacatggtaaagaaccagcagattatacacaacgtgttattgatattttgaaaaagcatggtgttgaacatcaatatcgtgtgatgtcattggattatgatgtgatgactaagttgaaaaaagaagcgccatatctcaagtgtggttatatcattccgttgcagtttggtcattttaaagaaacatcattagatttctttgtcatcgaagatttttcttattcgccaagacttgttaatcaagcgcacttggaaaataaagaagtctatacttggaccattaacggcgaagaagatttaacgaaatacttacaaaccaatgttgatggtattatcacagatgacccagcattagctgatcagattaaagaagaaaagaaagacgaaacatacttcgatcgttctataagaattttgtttgaataatataaacaaagacctctaaagttatcaagatgataccttcagaggtctttttaatgttgccatctatgggataggcaatcgtttcattcgtttatattcatatgacaagtatttgtatggcaatttggcgtcacaaacacttacatgatttattgataagttgctaattgttttgtgaatgcaaagggttagaaattgaatcgtaaatactttctaatctatgtttcgctttagtcatttgatccaaatttttagtgcgtatagcggattttgcaatatagtgcgcagctaaaatatcgcgtttttgaaacgcatctaaatttaggtacgataatttatttaagtcagtgtttgctattaattcatgtaattgatctacaagcgcttgatgttgatacgtatgtgatgtagtttcagatttgcttgctaatttaataccagtcgtatcaaggagcgccgctttaataccagcaactaaatatgttttgattttcatttgtgttgtcatgctttgttactcctttgatgtacattaatcaaaaaaattatacactattgtatattgcaaagctaattaactataacaaaaagatagttaatgctttgtttattctagttaatatatagttaatgtcttttaatattttgtttctttaatgtagattgggcaattacattttggaggaattaaaaaattatgaaaaagcaaataatttcgctaggcgcattagcagttgcatctagcttatttacatgggataacaaagcagatgcgatagtaacaaaggattatagtgggaaatcacaagttaatgctgggagtaaaaatgggaaacaaattgcagatggatattattggggaataattgaaaatctagaaaaccagttttacaatatttttcatttactggatcagcataaatatgcagaaaaagaatataaagatgcagtagataaattaaaaactagagttttagaggaagaccaatacctgctagaaagaaaaaaagaaaaatacgaaatttataaagaactatataaaaaatacaaaaaagagaatcctaatactcaagttaaaatgaaagcatttgataaatacgatcttggcgatttaactatggaagaatacaatgacttatcaaaattattaacaaaagcattggataactttaagttagaagtaaagaaaattgaatcagagaatccagatttaaaaccatattctgaaagcgaagaaagaacagcatatggtaaaatagattcacttgttgatcaagcatatagtgtatattttgcctacgttacagatgcacaacataaaacagaagcattaaatcttagggcgaaaattgatttgattttaggtgatgaaaaagatccaattagagttacgaatcaacgtactgaaaaagaaatgattaaagatttagaatctattattgatgatttcttcattgaaaccaagttgaatagacctaaacacattactaggtatgatggaactaaacatgattaccataaacataaagatggatttgatgctctagttaaagaaacaagagaagcggttgcaaaggctgacgaatcttggaaaaataaaactgtcaaaaaatacgaggaaactgtaacaaaatctccagttgtaaaagaagagaagaaagttgaagaacctcaatcacctaaatttgataaccaacaagaggttaaaattacagttgataaagctgaagaaacaacacaaccagtggcacagccattagttaaaattccacagggcacaattacaggtgaaattgtaaaaggtccggaatatccaacgatggaaaataaaacgttacaaggtgaaatcgttcaaggtccagatttcccaacaatggaacaaaacagaccatctttaagcgataattatactcaaccgacgacaccgaaccctattttagaaggtcttgaaggtagctcatctaaacttgaaataaaaccacaaggtactgaatcaacgttaaaaggtactcaaggagaatcaagtgatattgaagttaaacctcaagcatctgaaacaacagaagcatcacattatccagcaagacctcaatttaacaaaacacctaaatatgttaaatatagagatgctggtacaggtatccgtgaatacaacgatggaacatttggatatgaagcgagaccaagattcaataagccatcagaaacaaacgcatacaacgtaacgacaaatcaagatggcacagtaacatatggcgctcgcccaacacaaaacaaaccaagcaaaacaaatgcatacaacgtaacaacacatgcaaatcgtcaagtatcatatggcgctcgcccgacacaaaacaagccaagcaaaacaaatgcatataacgtaacaacacatgcaaatggtcaagtatcatacggagctcgcccgacacaaaacaagccaagcaaaacaaatgcatataacgtaacaacacacgcaaacggtcaagtgtcatacggagctcgcccgacatacaagaagccaagtaaaacaaatgcatacaatgtaacaacacatgcagatggtactgcgacatatgggcctagagtaacaaaataagtttgtaactctatccaaagacatacagtcaatacaaaacattacgtatctttacaacagtaatcatgcattctatgatgcttctaactgaattaaagcatcgaacaatcggaagcatatttctaaattatttattcattatagtcttaaacataacatgacctaatatattactaacctattaaaataaaccacgcacatctaagtgatatacgacaatcacagcaataataattgctttagaaagtcgtgccgaactggaacttacaagtctagttcgaacacacactgatgtgagtggttttctttattttaaacatgaacaatcagataagttactagcattagcaaatattattaaatcaaagggcttcgattcataaaatttaaaacaatgattaaaattagacgtgtaaatgttaaattctaaaacggaaataaccaccatcccattaaaccacttttttgttcaatcactatatttcacacagcttcattaataaaacgaaattgcttcaacccgcttcaacttcaactggcttcaacttcagcctacttcattcaataacaaaacgaatccgcttcatccaaaatcaaccattctaacgcacatattcaaatatagcagctgcacccataccgacaccaatacacatcgtaaccatgccgtaacggctatcgggacgtctacccatttcattaagtaaacgcgcggttaacattgcgcctgtagcacctaatggatgacctaaagcaatagcgccaccattcacattcgtacgtgatatatctagacctacttctttaatagatgcaattgtttgagaagcaaatgcttcgttcaattcgatcaaatcaatgtcttcaacagatagattgctgagtgacaatacttcaggaatcgcatatgcaggcccaatacccataattttcgggtcaacgcctactgccttataaccaacgaatcgtgcaataggtgtcacgcctagttctttcactttatctccagacattaaaactacaaatcctgcaccatcagaaagtggggcagatgttcccgcagtcacagtgccgtcagctttaaatactgtacgtaatttggctaatgcctccatcgtggtgtcagggcgtataaattcatcttggtcaaagatatttgtgtgtacttttggtcctgcgtttgtatattcaactgagtttacttgtattgggataatttcatcgttgaaccgaccatcacgttgtgcttcataggcacgttgatgacttctgacagcataagcatcttgatcttcgcgtgatacgtcaaattgggatgctacattttcagcagttaaacccataggatatgacgcacctatatcatcatattgtaaggtaggattgtttgtgggctcgttgccacccattggtacggcactcatcaattcaacgccaccagctacaagtatatctccttgaccagccataatttgattggctgcaatcgcgatggtttgtaatcctgatgagcagtagcgattcactgtttgacccggtaccgtgtcagataatcccgtaagcaatgcaatcgttcgtgcaatgttttgtccttgtaatccttctggaaaagccgtaccaacaatgacatcttcaatcatattcttattgaattttccgtcaatacgtttcaatacgccttgtaatactttggctgcgacatcatcaggtctttcgtggaataatgcgccttgctttgctttcgctgcggctgaacgcccataagctacaatgtatgcttcttgcatggttatcatcctctcttaatgactatcttttaattacgtaatggcttaccagtttttaacatatgtgcaattctttcatatgattttttagattttagtaagtcaataaagccaattttctccaacgattgaatgtaacgttgattgataaatgtatttcttggtaaatcaccacccgctaaaattgtggcgatatttaaggcgatatgataatcatggtcgctaataaaatgaccccgtctttgcgcatctaattgtccttggatcaatgctttgaagtcttcacctaaagcgatatattgatgtctaggattcggaatatagtttgtttctgcttcatatttcgcacgtttgagcgcaacttcgacacgttgtgctgtattgaaaataatcgtatctgtatcacgtaaataaccataacgacgtgcctcaaaggcatttgtagagactttcgcaaatgcgatattcgtcagtacttttgtcatggaagcttgtttgtcatcaaacttatgcgatgtgcgtaatatgcgatcagccatttctgcaaggccaccgccactcggtaataagccaacgcctgcttcaacaagaccgatatacgtttcacttgcagcgacaacaataggtgagtaaagtacaagctcacagccaccgcctaaggcacgaccttgaacagctgtgactactggtttcaaactatacttcaaacgattaaagctataatgtaatttatcaattgattgtgcaacgacatcatctacaagaccgtcttcatgcgcctttttcattaagaaaaggttagcacccacactgaaattgttaccatctgcataaataaccatacttgtgtaatggtcattttccagtaaatcaatcgcatcaactaacgcatcgttgaattcatcggtaatgacattatttttactttgtaatttcagtaacagttgatcatcatgagttacggaaagtttggcatcacctttatcccaaagttcatcttttacgaagtgagaaacaggtgttgcatattcgatggtctcatcttgtttataaaagccaccatctaaatcactaatccattgtggtaagtctccaatttcgtcttccatacgtgttttaacacgttcatatcccattgcatcccataattggaatggaccaagtttccagttgaacccccagacaagcgcacggtctatgtctcggaaatcatcggtagctttaggtacattgatagcagagtaatagaaattattacgtaatgtctcccataaaaatagtcccgcttcgtcttgcgcattgaatatgacatcaaggttatgcactaagtctttattaaattcatttaaaattggtaattgtggttgcgatacaggtacataatcttgtttttcaacatcgtaaacaagtcgagctttagtttctttatcctttttgtaaaatccttgtttcgttttacgtccgagtgcgccattgtcaaacaacgtatttacaattttgacatcatgaaaataaggcgtttcttcaggtacttgttgcatgcctttaattacagacactgcaatatctaaaccgactaggtcagatagggcatatgtacctgttttaggacgaccaatcgcttgcccagttaaagcatccacatctacaatgcttaacttgtgttgctcggcgcgatacataatatcattcattgtttgcgtgccgactctatttgcgacaaagccaggcacatcattgacgacaatgacacctttacctaacacattttgcgcgaaattttttacatctaatatgatagattccttcgtgtgtgacgtaggtattaactccactaatttcataatacgtggtgggttaaagaaatgtagaccaaagaatcgttcttgatccttctcgttaaatgtttgagcaatcgcattaattggaatacctgatgtatttgtagcgaataaagcatcttctttagcatgttgtagaacttgttgccaaacagcatgcttaatttcaatatcttctttaactgcttcgatatataaatcagcatcatcatttaccaagtcatcatcaaaattaccatatgttaaatgactcgctagatttaagtcgaatagtagcggccgtttcttatctgtaattttatcgtaagattttttcgcaatgagatttggatcgtttttgtccactacaatatctaatagttttactttaagtccagcattcacaaagagtgctgccagttgagcgcccatcgtgcctgcgccaagaacggttactttattaattgtcatagtgattcctccaatttagttgaggataagataaccattaagataattggaataacgttgctattttataaaattaattaagtatctttgacagtcatcttagcctcttatttaaggaaaaagctttatgcttaaaataagtctttttttagtgatattactgcatctcatataattctttgctatttatacgaaagcagaatctccagtcaaagcgcgtccaattactaaggcattaatttcatgtgtaccttcgtacgtgtaaatcgcttctgcatcagagaagaaacgtgcaatatcataatcgtcagctagtatgccattaccacctgtaataccacggcccatagctactgtctcacgcaaacgtaaggcattcatcatcttcgccgttgaagttgcaacctcgtcatattcaccatgtgcttgcatattagctaattgagcacatgttgccattgcttgagctaaattaccttgcatcattgctagcttttcttgtattaactgatatttactaattggtttgccgaattgcttacgctcagtgacataatctaatgtggcacgtaaagcgccagccataccacctgtagccatataagcaacgcctgctctcgttgaataaagaattttggcaatatctttaaagcttgttatgttttgtaagcgatccgcttcatctactttgacattagttaatttaattagggcgttaggaacaatgcgaagtgcgattttattatcaatgacttcaatatcgacgccatcttgttctggtctgactacaaagcaatggggtttgccagtttctttatttactgcgaatactggaatgacatcagatacatgtgcaccaccaatccatttcttttcaccattgataacccaagtatcgccctggcgttcagcgactgtttcaagacctcccgcaacgtccgaaccgtgttctggttcagttaaagcaaagcatgtacgcagttcatgtgactgtaatttaggtacatatttcgcaatttgttctttgctacctccgaaatagaaagtgttatgccctaaaccttggtgaacaccgagtagggtagctaaggaaatatcaaatcgcgcgagtaggtaagacatgaaaaactgaaatagttgactaggcattttggcgtttggacgatccttgtaaagtaatggattgttaaaataatttaattctcccagatctttaaaatagtcctcgggtacagtagcgtctatccaatgttgattaatattttcacggtacttactttctagcaatgaatctacttgttgtaaaaattcgacttcaccgtctgttaaacctttagcaatactaagtacatcttcaggaaataatgtttttaagaccgtttctttttcaaatgtcatataaattcctcctaaaaataatatgaatactaatgtgaaatgcatttaattcaaaaacaacacgctttatttgtaaacgcttacactaaatgtcaaaaatttttatcacctttaaagtgtttgtgagactttgtcattcatcatttgtcgaatcgcaagtttatctggtttctgcgtactgtttaacggcatatgtgtcactggtacatacattcttgggactttataacctgctaaacgacttcgcatatgttgatctaaaatttcagcgtaatgaggttcatcttcgcgaagtataatggctgcagcaattgattcaccatattttggatgatcatagccaacgaccacacaccggtctactagtggatgctcagctaaagcattttcgacttcggatggtaagacattttcgccaccagttatgattaattcttttttgcgttcaataataaatatatcgccatcgtcgtccatcttcgctaagtcaccagttaataaataacgaccatgaaatgctttggcagtctctgctggtttattccaatatcctggcgtgacatttttagccttaattgcaagttcgccaatctcaccagtaggtacttcctcaccgttatcatcaaggatacgtgcatcaacgaacatgactgctttaccaatactcattggcttacgttttgaattttccggtgtattaacaagtacaagaggtgcttcagttaaaccatagccgttaataatgtttatgccatattgtttaaaagctgcttggatacttggtaatggttgtgaaccaccttggatgatataatccatagctttaaaattttcaggattaaaattactagcacgtagcgtactataatacattgtcggaatcatgataataaatgtagggtgatattgtgcaatcatgtcattcaattcttcgccgttaaagtaacgttgaagaataagtgtgccacctgacatcaatactggtaatacagtatcgttaaaccctaaaacatggaacattggtgttgatacaatcgtaatatagtttgaattgaacttatacgtcagctctaggtttgcaccgttatgaacaaatgattcatatgagaacatcacacctttaggtgatccggttgtaccacttgtataaattaatgctgcaagatcttgtggttcgacaggtgttgcttgaaaaggttggtgataatctggatttacgatttcatcatattgcgctacatcaatatccatatgcaataagttttggtcaatatcggtgagtgaacttaaatgtttttcagcatagaagagcagttttaattgtgcatcttccacaatggctgcaatttcttttgggttaagccgccaattcaatggtaaaaaaaccgcacctgttttaaaacaagcaaacaataaatctaatattgcaatatcatttggcgcaaaaataccgataacatcgccttttttaacaccttgagatgttaaataatgtgccatattatcagcgcgtgcattgagttgttggtatgtccaagatgtttgttttgcgtgatcaataacggcaggcttgtcatcatcgaagtctgaacgcgtttttatccaatcgaaattcattagtataccccctttagcttcactttcatactttatgaattgattgtttaagttgtccccatttttctttgtaaatgctggtatcaattaattttaaatgatcagcaataattggtttaaaagccatttgattcaaaatatctttatgcaaatcaagacctggtgcaatttcaattagtttcaagccttgattggtgagttcgaatactgcacgctcagtaacaaaatagacttcttgctcgagtgattgtgaatattgtgcattaaagtcgatatggctcacatctgatacaaatttctggttttgtccttcagtttcaatgtttaatcgttgattatggcatgagacatgactgccagctacaaaagtacctgaaaagataattttatttacagattgcgtaatgtctataaagccaccacatccatttagtcggtcattgaagtaagacacgttgacattgccgtattgatcaacctcagcaaagctaagataggcaactgatacaccattgttataaataaaatcccatgctcgatcatgaggcatgcgcacatctgcattgtaattcataccaaaatgttcacgactcccaacgaatccaccgaaaatgccaacatctaaaatcggttgcacatcatgttcaacacattcttcgtgcaataaattagagagttcattattgatgccataaccgatgctaattgtatcgccataagttaaaaactgagcagcacgtcggagaatcaatttgcgactattaaaaggtaatgcgggttcaggtattccatcaattcgttcttctccagacaaggctggtaaataatgactctgaattacttggcggtgattcttttcatcttctgtgacgtatacataatcgacaagatttcctgggataacaacttcattcggttttagttgatatccgtcaactaaagctttaacttgtacaataactttcccatgattggctttcgcgtttaatgcgacatgataacactcgctcaagtacgcttcttgagttaaataaatgttaccttgttgatctgcgtatgttcctctcagtagtgccacatcaacgctagggaatgtgtaatgtaagtatgtttcatcgttgatggttactaatgaaactaaatcatcagttgttcgtgtatttactttaccgccaccgtatctaggatcaacagctgtgtttaatccgattttagtaataactccaggtaataattgattactctgacgataatgagttgcaatgataccttgtggtaaaaaataagcttcaatgtcattatttttcattgcttgtgccgttttggaagaagccgttaaaatgctcataatgacacgtttaatcatgcgacgttctataaaatcatctaaatccggtgcggcacctaaactatggatatcattcgctaatataaacgttaaatctttgggcgtatgatatgtgtcatgttgcgctaacacagcacgtagaacttcggcgggtaagttggctacagctaatgctggtaaaccaatcacatcaccatctttaatgatatgttgtaagtcgtgccatgtgatttgtttcaagcaagtcacctccatcacatttgataaaatatagcgtttttacactttgtgtaaacccttacaagaaatataacataacgacgtttaaaatcaattagaaatatctttttattctgataatagacacagtatagacacattttgatggttgataacaattgtaatatcaagggtttgtaatgaattgaatatcattaaaatacttatataaaaatattgctcggaatataaaaagttaaataggttttgatttttaaatatgaaatacaaagcgcccaatcgaacaaagtatttatattaaaatatggaaaatccatcaatattaaattaaaatagttttattatgaaaagtgaaagtaggtaagtctatggaaggtcttaatcatcgaagaaatacagaaaaagaagagacaacacaaacgcaatcagttgcacctaatacaggtgaagaggggatgtcatcagcaagtacacaatcaactaagacgtccgacatacataatgaatctatcaataaacaaatggaagccaaagcgcatgaaacagcgcaaaatgcagatttaaaaaccgaagcaagaagtttatttgataatgcaaccaaatcaatcggtagactagccggcaatgatgaaagcttaaatcttaatttaaaagatatgttttctgaagtatttaagccgcatactaaaaacgaagcagatgaaatatttatagcgggtactgctaaaactacgccagcaatttgtgacatatcagaagaatgggggaagccatggctcttttctcgagtattcatcgctttcacagtaacatttattggattatgggtcatggcagcgatttttaataacactaacgcgattccgggtctcatttttataggggctttaacagtaccattatcgggtttgttcttcttttatgaatcaaatgcgtttaaaaatattagcatttttgaagttattatcatgttctttattggcggcgtattttcattactaagtacgatgttattatatagatttgtcgtttttagtgatcaattcgaaaggtttggttctttaacatttttcgatgcatttttagtaggattagttgaagaaactggaaaagcactcattattgtttatttcgtcaataaattgaaaacaaataagattttgaatggattattaatcggtgctgctattggtgcagggttcgcagtttttgaatcagcaggttatattttgaatttcgctttaggggaaaatgtcccattattagatattgtcttcacacgtgcgtggactgcgattggtggtcatttagtttggtcagcgattgttggtgctgcaatagttattgcgaaagaacagcatggctttgaattcaaagatatttttgataaacgctttttaatattctttttatcagccgttggtttacatggcatttgggatacatctttaactgtacttggcagtgatacgttaaaaatatttattttaatcgttattgtgtggatacttgtattcattttaatgggggcaggtttaaaacaagtgaatttactgcagaaagaatttaaagaacaacagaaaaaagtagacgaataataattaaagcttatgttgctcatatgtttgtgacataagctatttttataatttgtctttaaaagagtggaataggaatacttttcggagttaaaaaagtgtttcacgttaaacaaatagtgacaattagatttatataaaatgaacatgattcactgaaagtatgtaataatcattttattgaaattcatcaaacagaaattaatacaatcatataagcaaattaaaccacgccataatcatattggatgacttcggcgtggtttttatagttgaagcagggctgagacataaatcaatgtcccacactcccttatcgttcaatcgttgttcgataatcgattaaatagataccttcaggtgttactttataatttttaaccttagcgttagcagcgactatttgatcgttgtaagcaatataactgtttggtacatctcgacttgataatttaataatatcattagaaatattgtgacgttccttaacatctacagtatgattcaattgattaattaaatcatcgacgttgctattattgtagtctcctttattaatagcaccatcttttttatatgcttgattaaagaaataacctgtatcaccgcgagggattgtcccaaaactatacatcgttgcatcccatgcagaacggtcttttaagtaaccttctatgtcatcaacacttttaatgtcgatttcaatatttgcttttttagcatctgattgtaatacttgcgcaattttcgatagctctggacgaccgtcatacgtaattaacttaatttttaaagggtgttcttttgtataaccatctttagctaataacgtttttgcttgttcgatattttgtttggttaacttaggttctttaatatatggaattttatcattaaatggactcgttgcaggtttcgcataaccttgataaatatgatctgcaataccttgtctatcaatgatatgatctaatgcttcacgaacggatttagtcatttttttattagtatgattatacataagtaaagaagttctaaatccagattcttttgacacttttaaattttgattattttctatgtcttgaactttattaactgggacatcagttattaaatcatctttttgagattctaaatttctgacgcgattattgccgtcttcttggtacgtcacagtaatatgatcaagtttgggtttaccttgccaatagtccttaaaattcgacaatgatatttttcgagattgcttataatcttttatttggtaagggcctgtaccaacaggagtttgattaacatctgatttagcatctgtatcataaattgccataaaaggattagctaattcagatacaagttcagggtaagcggagttggttttaattgtcagtttttgacctttagcggtaattgatgatattggtaatgaatatttgaccaagtcgctttttttcatgctattttcaaggctagatttcactttttctgcagtcaatttttgaccgttttgaaatttaatattatcttttaattctatatctaacgttgtatcatttggttgatgatacgatttcactaatgctttttctatttttccttgatcatttgttttaaataatgattctgcagcaccaatcttaactggtacatctgtttcataaggtgcaatagactttgtttttaacggtaacgaaatatttaagtctttgccagatgaatgcattgagccacatcctgataacactaatactgctgaaaatatagttgctagtcttttaaacttcatttcattaacactctctttctaattactatgtaaaacccaacaattaatattttaaaactttattttgttaaagtaaaatattgttcaagtttagtaatcattaaagttcaattaattgtagtaattatgctttttaaaaataaatattagaaatgaagttagcgatatttatagtgattcacgataaacatatatacctaagtattgagcaactgctgtagtactacagcttggttatgtttagtatcttttgctgcatataacaatagaacatgattatgctgatttacaatatcctttaatttttcaaaagcatctttttgtgcatcctgatcacgtaattctttttcatatttttctttaaaagctccaaaaagtttaggatcatgttggaaccattgtcgcaactcagtagaaggggcaatgtcttttaaccaataatctaggttagcagttcttttcgaaatacctctcggccagactctatcgactaggatacgaatagcgtcggtattatctttattgtcataaatccgtccaatatctacggtcatcttgtgaactcctttcttatgaaattcagtgagcatacatcaatgcatgttgtggtgggacgacgaaataaattttgcgaaaatctcattactgtcccactcccaattaaaaaactgccatgacaaagtaaagtcatagctgtttttgtatatatgttatttatttttacgtttagttaaatactttaaaccaactgcaaagaccgtgtacccggctatggtttgtatcaatgttttaattaaattattatttttaacaataatatttgcagtaacaatacttacgaaatataatgcaaatacttttacgtaacgttgattaagtttcatatgagcactaaacctcttttctcagttatactgcaacgcttagtcttggaataaatgtttcgtagtgtacgcgatccatatcgtaatttaaagatttaagtgcttcgatcatagattgtaagaattttgtaccaccacagatataaatttcaggtttatttgctaaaaatgcttgtaattcttcagcgccaatatagccttgtttatcttttaagtgtgtatataatttagcgttgtcatgatggcttgcgatactgttgaagttgtctttgaaaggtaaatgttgttcattttcagcaacttgaaccatctgtgtatctaaacctttggcagaggcagcttcatacatagctactaaaggtgtaacaccaatacctgaacctaagaaaagttgtggttcagtcgtattctctaatacgaatccacctacaggcgcagctaaattaatcatatcgccttctttaatctcatcgtgtaaaattgttgaaacttcgccttcatgttctgttgtgacatcacgtttaacgccaaaagttaaatggtttttttcacctgatacgatagaatagtgacgtttagctctatatggaagtttttcactagaaacatcaactgtgatgtattggcctggtgtaaattcactaaagtcatattcttcagtttcaactgtaaatgatttaatgtcttcagattcttgtttaatattggtaattttgaatggtttaaaacctatccacatcatttgatcataaatttctttttcaatttggatgaacacatccgcaataacgccatatgcttttgcccaagcttgaatgacagggtcattttcttctaatcctgtcacgtcttgaatggcttttaataaattttcccccacaattggataatgttcagcataaacttgtagtgcgcagtgtttatatgcgactggcataatgactggtttaataacacttaagttatcgatattaaccgctgcggccattacagcttgtgctaatgctgaagattgcatgcctcgtttttggttcgtttgattaaacatgtttaaaagttcaggatgcgctttaaacatttttggataaaagattgacgtaatttctgtccctttctctttaagtaaaggcactgtttgtttgataatgtctttctcttgttctgtaagcatgatactcctcctttaatctgtctattttgattattctactaaaaatttcgatattcaattaattagtttgagaaaatataaataaaatggcaaatttgataattgtatgacatttttaattttttaaatacttatcaataagcattgtgtacaattgtctgtttgcacaccgacgattgcgcgcatttatttgactaattcaaaaaacattgttgttttcttagaaaaaagtaaacatgataataaaaatgtgaaagtgtaaataatcactggcgaagtacgaagactaaagacatctaagatgtaatcgtatacaaattaaaaaggtgtaaaaattaaaataaaatgtgaaataaatcacaatttaatattgacctagtacttaatgtatgttacattttatatgtgaaataaatcacaaacttaaaagcggatgacacatgaccttttaagttatgcgttgaaaataaaagagatgtttatttgtttttgtatcgtcaataagcagcattaaactaacatatttgaaactacacgtatgttagtgaattaatcataagggagtttttgtaatgaacaaatttaaagggaacaaagttgtattaataggtaatggtgcagtaggttcaagctacgcattttcattagtgaaccaaagcattgttgatgaattagtcatcattgatttagacactgaaaaagttcgaggagatgttatggatttaaaacatgccacaccatattctccaacaacagttcgtgtgaaagctggcgaatacagtgattgtcatgatgcggatctagttgtcatctgtgctggtgctgcacaaaaacctggagaaacacgtttagatttagtatctaaaaacttgaaaatattcaaatcaattgttggtgaagtaatggcatcaaaatttgatggtattttcttggtagctacaaatcctgttgatattttagcgtatgcaacatggaaattctctggtttacctaaagaacgtgttataggttctggtacaattttagactctgcacgctttagattattgttaagcgaagcgttcgatgttgcgccacgtagcgtcgatgctcaaattattggtgaacatggtgacactgaattaccagtatggtcacacgctaatattgcgggtcaacctttgaagacattacttgaacaacgtcctgagggcaaagcgcaaattgaacaaatttttgttcaaacacgtgatgcagcatatgacattattcaagctaaaggtgccacttattatggtgttgcaatgggattagctagaattactgaagcgattttcagaaatgaagatgccgtattgactgtatcagcattattagaaggcgaatatgatgaagaagatgtttatattggtgttccagcagtcatcaatagaaacggtattcgcaacgtcgtagaaatcccattaaacgacgaagaacaaagcaagttcgcacattcagctaaaacattaaaagatattatggctgaagcagaagaacttaaataactttttataaaatctataccattccaaaaattgtaaaaccttacccaaaaaattgtataaagggctatttgatacaactatatgtgtcgagtagccctatttttaatgtagtgaaagtcgttgttgaaattaaattcaaatctggcacttaagctttaatcatagcattaagatgattgtctagcagaggcgatttgcgggctcactacagtgcatgatgaacttaatgcttcaaatgtaacattaaaaataaaagcaacgatgtcacttcttacttcgtacatcgttgccattagttctgttgatatttcggttagtcttaatccccgagcaattcttcaatttcatttttgataactgtaacgtgaggcccataaattacttgcacaccagtgccttgctggattacacctttggcaccagtactttcgagtaatactttatcgactttgtcattttgatgaagtgtgacgcgtagtctcgttgcacaacagtcaacgatttcaatgttatctttgcctcccaaaccagcaacaatagtttgtgctctttcagtagcctcaacttgttgtgctgcagctttatcttctcgaccaggtgttttgaaattaaatttcgtaattaagaatctgaaaacgatgtaatacaaacagaaccacacaattccaataggtatgacgtataggtagtttgttttactattaccttgtagcacaccaaagagtaagaaatcgataaagcctccactgaaggtttgaccaattgtaatgttgaaaatgtctgccatcataaatgctaatccatcaaagaaggcatggattacataaagaataggtgcgacaaacaagaaactaaactctaaaggttcggtaatacctgttaaaaatgaagtgagtgcagcggataacattaaaccgccgacaacttttttatgttcaggtttagctgtgtgataaattgcaagtgcggcaccacataagccgaacatcatcgtaataaaacggcctgacataaagcgtgacacacctgaataatacttcgtcacatctggatcaccaagttgagcaaagaagatgttctgcgtaccttgaactaagtgccctttgacttctaaagtaccaccaagtgccgtctgccaaaacggtaagtaaaaaatatggtgtaaaccgagtggacctaacaatcttaagatgaagccataaacaaaagtaccgatggcacctgttttcgttacaaatccaccaacatgataaatgccggcttgtatgcttggccaaatgaaaaacatcaatacacctaaaaagattgcggcaaatgctgtgacaatagggacaaatctagagccaccaaagaaacctaaatacggtggtaataccactttgtgatatttgttgtgaagtattgcggtcataatacctgtgataatcccgccaaaaacaccggtttcaaccgtttgtataccgagcaccatgccttgtccattttgtgcaagctgatcttttgccaatgtgcccgtgatagttaataagccattcatagttgcgttcataattaagaaaccgagcagcgcagctaaacctgcagtacctttatcgcttctagataatccgattgcgacaccaattgcaaagatgaccggtaaattttggaaaacaatactacctgcagctgacattaatgtaaaaatattttgtaataaggtaatatctaaaatagggtatgctttaacggtgtttggattacttaatgcaccaccgatacccaacaatagacctgcagctggtaagattgcgataggtaacataaaggacttgccgaactgctgtgctttttcaaataaagatttcatcaacatccctcctaattattctcaatatagcttttgagaaatttaatatcaatatatattctgtgtatgaaaatatttttcataaaaattgtttgaatcatgtaacaatcatataaattgctgtttatattgttgtgaaaatgagttgacaaaagtcggtatagatatgtagacatcctatttttagcgaggtaggttgataaggcatatcggataaatttataagccataaaatagataaatagtgtttgtatccaaaaatatgagaaagttaaaactatttttcaaaataaacatgattcaccacataaataaatatacataagctatcgataacaacttaagaaaggtggatatataaatgaaaagaaagattattatggattgtgatccaggacacgatgatgcaatagcattaattttagcgggggcaattgacagtccactagagatattagctgtaacaacagtcgcaggtaatcaatcagttgacaagaatacgacaaacgccttgaacgtattggatattatgggacgccaagatatagcagtagcgaaaggtgcggataggccgttaattaaaccagctgcctttgcttctgaaatacatggggaatctggattagatggtccgaaactaccgtcgacaccatcacgtcaagcagttgcaatgccagcatcagatgtgattataaacaaagtgatgacgagtgatacacctgtaacaattgtagcgacaggtcctcttacgaatgtagcaacggcattgattcgtgagccaagaatcgctgagcatattgaatctattactttgatgggtggtggtacatttggaaattggacgcctacagcagaattcaatatttgggtagatgctgaagcagcgaagcgtgtttttgaaagtgggattactataaatgtgtttggtttagatgtaacacatcaagttttagccgacgatcacgtgattgaacgctttgaaagtatcaataatcctgttgcacagttcgtcgtagaattattgcaattctttaagaagacatacaagactcactttaatatggatggtggtccaatacatgatgcttgtacaattttgtatttgttacaaccagaattgtttacaatggtacccgttaatatcgacattgaacatcaaagtccactaacttatggcactatggctgtcgatttaaatcatgttacaggtaagcctgccaatgcttattttgctacagcagttgatgttgaagaagtgtggaacttgatagaccataagttacgtacatacgaataataatacttaattaaatagatacagttagccctaaggtgcctgatataagcgtccttagggtttttgtattggattacaatggtcatgacaatttgataatgattgagatatgtatgttaaaaatgcttcaaaaaacacaaaatacaaaaatatattcaaaatttcaattgctttattttaaaagattaaaatcacaaaaaatatagatataattgaaatgttgttaaaacatcacaatgatgtacatgctcattttgaaaatatgtgttcaaagtgtgtacatcggtgtgacgattgatgataaattgagctcagatgctcaaaggaggatcgaacatgaacggggataatcagcaaatactcagagaaattgtattgaatcctactattcatggtaaagaacttgaatcgatatttggtttgtctcgtagacaactaggatatcgcattcaaaaaatcaatttgtggcttgaacaagagggttatccaaaacttgaaagaacaagccaaggaaattttattgtaagttctgaaatcatgacgttattcaaacgagatgtatcagagcagcaaatgttaaacggcaacaatgtcatttttagcatagaaacacgtcgttattatttaatgctcatgctttttagtaaggaaaacgcaatgtctctaaaccatttttcaattgatttacaagtcagtaaaaatactgtcattcacgatataaatcatgtgaaagagcaattggaaaatcatggtttgtcacttaagtattctcgaaaacatggttatgaaattgttggtgatgaatttgaagttcgccgtttcttcattaagttgattgatcaaaggttgaatcatgatattactaaaagtgaagttttaaaggcgctcaacttaacattcgaagatatcgcatatcaaaaagacaaaatcaaacaggtagaacaatttttgaagagtcgctttatagacaaatcacttagttcattgccttatgtcctttgtgtgattcgtagacgaattcaaagtggtcatgtgatgaatccattaaatattaattatcagtatttgagggatacgaaagaatatcaagcaacggagattatgacgcaacttgagccggatttgccagaagcggaaaagttatatttgacattacacttactttcaacaagtgtgcaatggactgatttgcaggaatcagataacatatcgaatttaacgatggctatcgctcaaatgattcaccattttgaacaaatcacttttattaacattgaagataaggagaaattatcacagcaactcttgttacatttaacgcctgctttttataggattaaatataacttaacggatcgtgatgaattaataaatcctttacaaggaaattatcaatccttatttcatatggtgaaacaatcatgtcaatcgttaactgaatatttcggaaaatcgttgcctgataatgaaatagcatatttaaccatgttgttcggaggtagtttgagacgtcaagatgaaaacttcgatggcaagataaaagctattatcgtgtgtacacaaggcacgtcagtatcacaaatgatgttatacgagttgcgaaacttatttccagaaattattttcttagatgcgatttcacttagaacatttgaaaattacacattagattatgacatcgtcttttcaccaatgtttgtcctaacacataaaaaattatttatcacaaaagtagctttatctgaaaatgagcaacgaaagttacgtaaagaagtgatgaagtacattaataaggaatcggctgacattgataaggaaataaacaagttaatggcattaattgaacgcactacgacagttaatgacattacagaactacgtgatggtttagaagattttattgcgaattataattcaatttcaaccattaatggatcgattgtcacacaaaataagacattagatttagctgacttgataccggcaaggcacgtgaaaagaatacatcatgttgaaaatattgatgaagctattgctaaagcaagtgatgtgttagttgctaatcattttattgatattaaatatattcatgagatgcaacaggtatttgatgattcgtatatggttatcatgcaaaatattgctattccacatgcatactctgaaaagcatgtacataaaacagcgatgagtatgttgatattacaagaaccaatatacatgtcagatggcacagcaatccatattattgtacctattgctgctgttgataaagtgacacacttaagagcgttactacaattgagagatgtggcgcaagacaatgacgcaattaagcgcatcatacaaagtcgcaaaaattctgatgtaaatgagattttaaaaaattattcaaataaagaagcgagggaaaatggatgggacagcaattagtgcataaagaaaatataatgctcaatttgtcggcaactgataaagaatccgtattgtcacaaatgtcagatgtgttatttcaaaatgggttcgtgaagtcaacgtttaaagatgcagtcatcgacagagaaaaagaatttgctactggtttaccaacacatctatgttcggtcgctataccgcatacagatgtcgaacatattaaccatagaacgataggtgtggctgttctagaaaaagaggtgccgtttattgaaatgggaacacttgatcaacagacagaagtgaaaatcgtttttatgttagcgatggataaagtagatgatcaacttaagttgttacaacagttgatgcaaatttttcaaagtgaagaaaaattggagcagattctgcgaacgaaagatgaaacgattttagcaacactaatcaatgattatttggaatataactaaaaattaattggaggaattgaaaatgaaacaagtattagtagcgtgtggtgcaggtattgcaacgtcaacagtagtaaataatgcaattgaggaaatggcaaaggaacacaatattaaagtagatattaaacaaatcaaaattacagaagttggaccttatgaagacactgcagatttattagttacaactgcaatgacaaagaaagaatataaattcccagttatcaacgcacgtaatttcttaactggtattggtattgaagaaacaaaacaacaaatcttaacagagttacaaaaataacggaattgatatgtaacgtgggtcgataacatattaatatatgcaaattgcatataaatgactatcacgacaaatgattgttgatgacatagaaacgcagtgactgtaattcaaaatgactgcagtcgaatgtagcaagggttgtcgttgaaatgactgtaacgtcaaatgtaatcacaatcggaaagtatcgtgacaatgcatatataacagggagggtttaaatatgagttacttcactgattttgtaaggggatttttagatttaggtgcaactgttattttaccggttgtcatattcttgcttggcctattctttaggcagaaaattggagcggcatttaggtctggtttaacaataggtgtggcttttgtagggattttcttagtcatcgatttattagttaaaaatttagggccagcagcacaagcgatggttaaaaatttaggcgtcagtctgaatgtgattgatgtaggttggccagcaacatcatctatcgcttgggcatcatctgtcgcagcatttattattccactcggaatcatagttaacgttgtattgctagtaactaaagtgacaaagacgatgaatgtagatatttggaatttttggcattatacgtttacagcagcaatggtttatgccgtatcaggcagtatttggcaagcgttattagcagcagttattttccaagttatctgtttgaaagtagcagattggacagcaccgatgatgagtgagttctttgatttaccaggtgtatcgattgctacaggaagtacaatttcttatgcaccaggtatttacttagttaaattgttacaaaaagtacccggtctgaataagttagatgctgatcctgaaacaattcaaaaacgttttggcgcatttggagagtctatctttgtcggattaattttaggtttaggtattggtgtgttagcaggttacaaacctggagacatcattaatttaggaatgtcaatggctgcagtaatggtattaatgcctagaatggtaaaaatcttaatggaaggtttaatgccagtttcagagtctgcaagaacatggctaaataaacgttttggcgaacgtgaaatttatattggattggatgcggctgtagcattaggtcatccagcggttatttcgacagcattaattttagtacctatcactgttttattagccgttattttaccaggaaaccaagtactaccttttggtgacttagcaactataccatttgttgtcgcgtttattgttggtgcagcaagaggaaacattattcattctgtcattgtgggcacgattatgattgcaatttcattatatattgcaacagacgtagcacccattttcacagatatggcgaaaggtacgaatgtacaaatgccaaaaggttcatctgaaatttcaagtattgatcaaggtggtaatatcgttaactatcttatctttaaactatttagtctattcaattaaaaatcgaggtgtttgtggtgaaagctttagtaaaaacaagagaaggacatggcaacttagaacttcttgataaagaagttgcaacaccgctagatgataaagtaaagattaaagtacattatgcaggaatttgtggcacagacattcatacttatgaagggcattataaagttaattttccagtgacattaggtcatgaattttctggtgaaatcgttgaagttggagcagacgttaaagattttaaagttggtgaccgtgtcacttctgaaacgacattctatgtttgtaatgagtgtgaatactgtaaatcaaaagactataatttatgcaaccatcgaaaaggtattggaacacaagttgatggcgcatttactaattatgtcattgcacgtgaagaaagtttgcatcatattccagatgaagtatcgtatcagtctgcagctatgacagaaccattagcatgtgcacatcatggcgtttctaagattcaagtcaattcaggcgatgtagcagttgtaatgggacctgggccaatcggattacttgtagcacaagtgttaaaaagtaaaggcgcaactgttgtggtaactggattggacaatgacaaagtcagattagataaagcagaagcattgcacatggattatgtagtcaatttacaacaaacagacttaaaaacgtatatcaatggaattacagacggttacggtgcagatgttgttgttgaatgttcaggtgcagttccagcagcacgacaaggtttggatattttacgcaaaaaaggtttctacagtcaaataggtatttttaaggatgctgaaattccatttgatatggaaaaagtgattcaaaaagaaataacagttgttggtagtagaagtcaaaagccagcagattgggaaccttcattgcaacttatggcggatggtttagtaaatgctgaagctttggtgacaaaaatatatgatatttcgaaatgggacgaggcgtatcaacatttaaaatctggcgaaggtattaaagcattacttaagccgctcgatttagatgaaaatgaaggagagaattaatatggtagaatcaatgctaacttttatgcttgggccattaagacaaatcactgatttttatatggaacatttactcgtaagtaattccattgtcattgcaggttattttgcgacaggtatttttaaaaagaaaaaagttgtgaattaaatcaaatttgaggtgatttacaagtgaaagcattgaaattatatggcgtggaagatttacggtatgaggataatgaaaagccagtcattgaaagtgcgaatgacgttattgttaaagtacgagcgactggcatatgtggttcagacacgtcacgatacaaaaaaatggggccatacattaaaggtatgccatttggtcatgaattttcaggtgttgtagatgccattggaagtgatgttacgcatgttaatgtaggcgacaaagtgacaggttgcccagcaataccttgttatcaatgcgagtattgtttaaaaggtgaatatgcacgatgtgaaaagttattcgttattggctcatatgaacctggatcgttcgcggaatatgtcaaattgccagcgcaaaatgttttaaaggttccagacaatgttgattacattgaagcagcaatggttgagccatcagccgttgttgcgcatgggttttataaatcgaatatacaacctggtatgactgttgcagtaatggggtgtggcagtataggtttgttagctattcaatgggcacgaatatttggtgctgcacatatcatcgctatagatatagatgcgcataaactagatattgcaacatcattgggcgcacatcaaacaatcaattcaaaagaagaaaatcttgagaaattcatcgaaaatcattacgccaatcaaatcgatttagctatagaatcatcaggtgctaaagttacgattggtcaaatattgacgctacctaaaaaaggtggcgaggtggtattactcggaataccatatgatgatattgagattgatcgcgttcattttgaaaaaattctgcgtaacgagttgacagtatgtggctcttggaactgtttgtccagtaattttccgggcaaagagtggacggcaaccttacattatatgaagacgaaagatattaatgtaaagcctattatttctcattttttaccgttagaaaaaggcccagagacatttgataaattagttaacaagaaagaacgatttgataaagtcatgtttacgatttattagtatgcacctttgaggacgaaaacactggtatagttatagctatgaaagtgcgaatgccgtctggtctacagatactatcgaaataactcatcttcgaatatacgttgctaaatagccggtttacttgtgtgaaatatgcttgtgaatcggttgttttgcattttgtatacttaaaatgagatggcaatatttgataatttttaaagtgaaaatcaagtacagccacttaataagataaatttattataatatatggtaaaatgatggcagtaataatgaatttgaaaaagagtaaacattaatacctttaacaatttaatatcgtcagagttaatgattaactgcatggcaaaacaacttagaatggtcagttacaaaaatacatttttataaaaaattatcacactattgtgacaactatctttggattaataaaagaggcaagtgagcaataggttaggcttatgtgcgggcataggtcagtaatgtataaatggaaatgatgtaatgacagaatggaggacaacatgatttatgcaggtattttagcaggaggtattggttcgagaatggggaacgtgccattaccaaaacaatttttagatattgataataaaccgattttaatccatacaattgagaagttcattttagtgagtgaatttaatgagattattatcgcaacgccagcacagtggatttcccatacacaggatattttaaaaaaatataacattacagatcaacgtgtcaaagtagttgcaggtggtacggatcgaaacgaaacaattatgaacattatcgactatattcgcaatgtaaatggaattaataatgatgatgtgattgtaactcatgatgccgtaagaccatttttaactcaacgtattattaaagagaatattgaagtagcagaaaaatatggtgcagtagatacagtcattgaagcaattgatacgattgtaatgtctaaagataaacagaacatacacagtatccctgtaaggaatgaaatgtatcaaggccaaacaccacaatcatttaatattaaattattacaagatagttatcgcgccttaagtagtgcacaaaaagaaatcttatcagatgcatgtaaaatcattgtcgaatctggacatccagttaaattggtacgtggagaactatacaacattaaagtgacaacaccgtatgatttaaaagtagcaaatgccattattcaaggtgatattgccgatgattaatcaagtatatcaactcgttgcaccgagacagttcgacgtcacatataataatgttgatatttatggtaatcatgtcattgtaagacctttatacttgtctatttgtgcagctgatcaaaggtattacacaggtcgaagagatgaaaatgtactgcgcaaaaaattaccaatgtcactagttcatgaagctgttggtgaagttgtattcgatagtaaaggcgtatttgaaaaaggtacgaaagtagtaatggtgccgaatacacctacagaaaaacacgacgtgattgccgagaattacctgccctctagttattttagatctagtggttatgatggttttatgcaagactacgttgtgatggcacatgatcgtatcgttccgctgcctaatgccattgatttgagtacgatttcatacacagagttagtgtcagtaagttatcatgctatacaacgatttgaacgtaaatctatacctttgaaaaccagctttggtatttggggtgatggtaacttaggttatattactgctattttgctacgtaagttgtacccagaagctaaaatttatgtatttggtaagacagactataaattaagtcatttttcatttgtagatgacatctttacagtaaatcaaataccagatgatcttaaaattaatcatgcatttgaatgtgttggaggtaaaggaagtcaagttgcacttcaacaaatagttgaacatatttcaccagaaggcagtattgctttgttaggcgtaagtgaattacccgtggaagtgaatacacgattagtacttgaaaaaggattaacattgattggtagtagtcgaagcggctctaaagattttgagcaagttgttgatttatatcgtaagtacccagacatagttgaaaagttagccttattaaaaggacatgaaattaatgtatgtacgatgcaagatatcgtccaagcgtttgaaatggatttatcgacatcttggggaaaaacagtattgaaatggacgatttaataaaccgatgggggaataacaatgacaaaaacgaaacaagcaatacatattgataacatatactgggaacgtgttcagttatatattgaaggacatagtgaaggtgtcgatttaacatcaggacaatttgttctgaggaatttaaccgaaacaaaaacattagaagcaaatgaaatgaaaatagacggtaatacatttatatgtagattcaacgtcgcaatattagacgatgggtattatttaccaatggataaatatttatttgtttatcatgaccagttagagtatattggacaacttaatccaaatattattgatcaagcttatgcggcattaaatgaagagcaaattgaagaatacaatgagctgactacacaaaatggaaaagtgaactatttattagcgtatgatgctaaagttttccgtaaaggtggcgtatcacaacatacggtctataccattactccggaaatagcaagtgacgttaacgaatttgtatttgatattgaaatcaccttacctcaagagaaatcaggggtcattgcgacaagtgcacactggattcataaacaaggtcataaagcttcatttgaaagtagaagtttcttatttaaagctatttttaatattacaaagttactacatattaaaagaagcaaaacaatattattcacatcagattcgcgtccgaatttatcagggaatttcaagtatgtatatgatgagttactacgccaaaaagtagattttgattatgatattaaaacggtatttaaggcgaatattacggatagacgtaaatggagagacaagtttagattgccatatttacttggtaaggcagattatatttttgttgatgatttccatccattaatttatacggttcgctttagaccatcacaagaaattattcaagtgtggcatgccgttggtgcttttaaaacagttggctttagtcgtacaggtaaaaaaggtggtccatttatcgattcattaaaccatcgtagttacacgaaagcatatgtttcatcagaaaccgatattccattttatgctgaagcatttggaattagagaagaaaatgttgtaccaacaggtgtaccacgtactgatgtactatttgatgaagcttatgcaacacaaattaaacaagagatggaagatgaattgccaattataaaaggtaagaaagttattctattcgcaccgacatttagaggtaatggtcacggtacggcacattatccattttttaaaattgattttgaacgtttagcaagatactgcgagaagcataatgcagttgtgttattcaaaatgcatccgttcgtaaaaaatagacttaatatttcacgtgaacatagacaatactttatcgatgtgtcagatcatcgtgaagttaacgatattctctttgttacagacttgttgattagtgattattcatctttaatatatgaatatgcagtatttaaaaagccgatgattttctatgcatttgacttagaagattacattacgacgcgtgatttctatgaaccatatgaatcatttgttccaggtaaaattgtacaatcctttgatgcattaatggatgctttggacaatgaagattatgaggttgaaaaagttgtaccattcttagataaacattttaaatatcaagatggtcgctcaagtgaacgtttagtcaaagatttgtttagacgctaatgttggcatatattacttgccatgcaaatgagtcataaggcatagttttcaagaagggttctgacaatgaagttagcaacatgtcatgatgagaagcaggactatacaatgagaataaccttttgatttttcatgcataagaggctgggacagaaatccctaaaaaacagcagtaagatattttctaattgaaaattatcttactgctgttctctatttatacaatacttcgtattgaatggcttcgctttgcccgtctggcacattactgtaaaattctataaatagaatttttgatgacgggtcccttcctagggtgccgtctcagccaccccaacttgcacattattgtaagctgacttttcgtcagcttctgtgttggggcccctgtcttcgactggcactgctccctcaggagtcttgccattaatactacgtattaacatgtaattttacttttaaatactttgaaaaataagatactttgcccaacttgcacataaatgtaaaattcaataaaatgaattttctgtgttggggcccacaccccaacttgcattgcctgtagaatttcttttcgaaattctatgtgttggggcccatccccaacttgcacattattgtaagctgacttttcgtcagcttctgtgttggggcccctgactagaattgaaaaaagcttgttacaagcgcattttcgttcagtcaactactgccaatataacttcgtagagcatagaacattgatttatgtcccagcctgttccaactgaattgtcattttgtaaaataaaataatcgatccaatcgttatctaattcataaatgtgtagacacatacgttatgaatggataacgattttttgttatgttaaagtggtacattaatcatgtatttcgtatgataattaacgacaagtgtaatggttaaatgtattttatgatgaaatgctataataggcatggttacaatgagcttgctcatacatattaatataattacaaaaacacgtcggaggtacgacatgattaaaaatacaattaaaaaattgatagaacatagtatatatacgacttttaaattactatcaaaattgccaaacaagaatctaatttattttgaaagctttcatggtaaacaatacagcgacaaccccaaagcattatatgaatacttaactgaacatagcgatgcccaattaatatggggtgtgaaaaaaggatatgaacacatattccaacagcacaatgtaccatatgttacaaagttttcaatgaaatggtttttagcgatgccaagagcgaaagcgtggatgattaacacacgtacaccagattggttatataaatcaccgcgaacgacgtacttacaaacatggcatggcacgccattgaaaaagattggtttggatattagtaacgttaaaatgctaggaacaaatactcaaaattaccaagatggctttaaaaaagaaagccaacggtgggattatctagtgtcacctaatccatattcgacatcgatatttcaacatgcatttcatgttagtcgagataggattttggaaacaggttatccaagaaatgataaattatcacataaacgcaatgatactgaatatattaatggtattaagacaagattaaatattccattagataaaaaagtgattatgtacgcgccaacttggcgtgacgatgaagcgattcgagaaggttcatatcaatttaatgttaactttgatatagaagctttgcgtcaagcgctggatgatgattatgttattttattacgcatgcattatttagttgtgacacgtattgatgaacatgatgattttgtgaaagacgtttcagattatgaagatatttcggatttatacttaatcagcgatgcgttagttaccgactactcatctgtcatgttcgacttcggtgtattaaagcgtccgcaaattttctatgcgtatgacttagataaatatggcgatgagcttagaggtttttacatggattataaaaaagagttgccaggtccaattgttgaaaatcaaacagcactcattgatgcattaaaacaaatcgatgagactgcaaatgagtatattgaagcacgaacggtattttatcaaaaattctgttcattagaagatggacacgcgtcacaacgaatttgccaaacgatttttaagtgataacttaaaaacaataaaaaattataaattaattagttaagtgatataaataataaacgaaatgtttgcttgtatgttattatttgtgtatgaaaacgtctgatataatgtaatataggtttaaacaaaatatgctaaaatataagcaaaatatgtataattttaagtaatacacagacatttagagttttgattttaaaatgagttttcaattgaaaaatgcaacgaaatttaaataattaaatatagatatagttgaatggaggaagtattttatgaaatacgctggtattctagctggaggtataggctcaagaatgggtaacgtacctttacctaaacaatttttagatttagacaacaaaccgattttaatccatacattagaaaaatttattttaattaatgattttgaaaaaattattatcgcgacgccacaacaatggatgacgcatacgaaagatacacttagaaaattcaaaatttctgatgaaagaattgaagtcattcaaggtggtagcgatcgtaacgatacaattatgaatatcgttaaacatattgaatcaacaaatggtattaacgatgacgatgtcattgtgacacatgatgcagttagaccatttttaacgcatcgtattattaaagaaaatattcaagctgctttagagtacggtgcagtagatacagtgattgatgctatagatacgattgttacatctaaagataatcaaacgattgatgcaattccagtgcgtaatgaaatgtaccaaggtcaaacacctcaatcgtttaatattaatttattaaaagaaagctatgcacagttgagtgatgagcaaaagagtattttatctgatgcttgtaagattattgtagaaacaaacaaaccggttcgacttgtaaaaggtgagttatataacattaaagtaacaacaccttacgatttaaaagtagcgaatgctattattcgaggtggtattgccgatgattaatcaagtatatcaattagttgcacctagacaatttgaagttacgtataacaacgtagatatttacagtgactatgtcattgtacgtcctttatatatgtcaatttgtgctgccgatcaaagatattatactggtagccgtgatgagaatgtcttatctcagaaattgccaatgtctttaattcatgaaggtgttggtgaggtcgtatttgacagtaaaggtgtgtttaataaaggtacaaaagtagttatggtaccgaatacgccgacagaaaaagacgatgtcattgctgaaaactatttaaaatcgagctacttcagatcaagtggacatgatgggtttatgcaagattttgtgttgctaaatcatgatagagctgtaccactacctgatgatattgatttaagtattatttcatatacagagcttgtaacagtaagtttgcatgctattcgtcgttttgaaaagaaatctatttcaaataaaaatacatttggtatttggggtgatggtaacttaggttacattacagccattttattacgtaaattatatccagagtctaaaatatatgtctttggtaaaacagattataaattgagtcacttctcatttgttgatgatgtcttctttattaataaaatacctgaaggcttaacatttgatcatgcatttgagtgtgtgggtggtcgcggtagtcaatcagccataaatcaaatgatcgattacatttcaccagaaggaagcattgcactgttaggtgtaagtgagttcccagtagaagttaatacacgtctagtattggaaaaaggactaacgttgattggtagtagtcgaagtggttcaaaagatttccaagatgttgtagacttatacattcaatacccagatattgtagataaattagcgttgttaaaaggtcaagaatttgaaattgcaacaattaatgatcttacagaagcttttgaagcagacctgtctacatcttggggtaaaacagtattaaaatggattatgtaaatagaaaaggatgaattaacgttggttaaaagtaagatatatatagataaaatctattgggaacgtgttcagttattcgttgaaggacatagtgaaaacctagatttagaagatagtaattttgtattaagaaatttaactgagacacgtacaatgaaggcgaatgatgtcaaaatagatgggaatcaattcgtttgtcgtttcaatgtagctatcttagataatggttattacttacctgaagataagtacttattagtgaatgagcaagaacttgattatattgcacagttaaacccagatgtgattaatgatgcatatcaaaatctaaagccagaacaagaagaagaatacaacgaattagaaacacaaaatggtaaaatcaatttcttattgcagacttacctaaaagaatttagaaaaggcggcatttcgaagaaaacggtttatactgttacacctgaaatttctagcgatgttaatgaatttgtccttgatgttgttgtaacgactccggaagttaaaagtatttatatcgttcgtaaatataaagaattacgtaagtatttccgcaaacaatcatttaatacaagacaatttatttttaaagcgatatttaatacgacgaaatttttccacttgaaaaaagggaatacggtgttgtttacatcagactctagaccaacgatgtctggaaactttgaatacatctataacgaaatgttacgtcaaaatttagataaaaagtatgatattcacactgtttttaaagcgaatattacagatagacgtggcatcatcgacaagtttagattgccatatttacttgggaaggcagactacatctttgttgatgactttcacccattgatttatacagtgcgttttagacgttctcaagaagttattcaagtatggcatgccgttggtgcctttaaaacagttggctttagtcgtactggtaaaaagggtggaccatttattgattcattaaatcatcgtagctatacaaaagcttatgtatcatctgaaaccgatattccattctacgctgaagcatttggtattaaagagaaaaatgtagtgcctacaggtgttccacgtactgatgtactatttgatgaagcttatgcgacacagatcaaacaagagatggaagatgaattaccaattattaaaggtaagaaagtcattcttttcgcaccaacatttagaggtagtggtcatggtacagcacattacccatttttcaaaattgattttgaacgtttagcaagatattgcgaaaaaaataacgcggttgtattatttaaaatgcatccatttgtgaaaaatagacttaatattgcagacaaacataaacaatattttgttgacgtttctgactttagagaagttaatgatatactgttcataacagatttattaattagtgactattcatctttaatatatgaatatgcagtatttaaaaagccaatgattttctatgcatttgatttagaagattatattacgacgcgtgatttttatgaaccatatgaatcatttgttccaggtaaaattgtgcaatcatttgacgcattaatggacgccttggacaatgaagattatgaaggagaaaaagtcattccattcttagataaacattttaaatatcaagatggccgatcaagtgagcgtttagtcagaaatttatttggtagctaagtttatatagtagtcaaagtgggagaggtataatgatgaaattttcagtaatagttccaacatacaattcagaaaagtatataacagaattacttaatagccttgcgaaacaagattttccgaaaactgaatttgaagtggttgtagttgatgactgttcaacagatcaaacgttacaaatagttgaaaagtatcgcaataaattgaacttgaaagtaagtcaactcgaaacaaattctggtggtccaggtaaacctagaaatgtggcgttaaaacaagcagaaggtgaatttgtattatttgtggactccgatgactatataaacaaagagactttaaaagatgcagcagcatttattgatgaacatcactccgatgtcttattgattaaaatgaaaggtgttaatggtcgtggtgtaccacaatctatgtttaaagaaacagcacctgaagttactttgttaaattcaagaattatctatactttaagcccgactaaaatctatagaacaacattactaaaagataatgacatttattttccagaagaattaaagagtgcagaagatcaattatttacaatgaaagcatatttgaatgcaaatcgaatcagtgtgttaagtgataaagcgtattattatgctacaaagcgtgaaggtgaacatatgagtagtgcgtatgtttcacctgaagacttttacgaagtcatgagattgattgctgtagaaatattaaatgcagatttagaagaagctcataaagatcaaatcttagcagaatttttaaatcgtcattttagtttttctcgtacgaatggcttctcacttaaagttaaactagaagatcaaccgcaatggattaatgctctaggagactttatacaagcagttccagaacgtgtagatgcattggtgatgagtaaattacgaccattgttgcactacgcgagagcgaaagatatagacaactatagaactgtagaagaaagttaccgtcaaggtcaatactaccgttttgatattgtagatggtaaattaaacattcaattcaatgaaggcgaaccatactttgaaggcattgatatcgctaagccaaaagtgaaaatgacagcatttaaatttgataatcataaaattgttacagagctaacgttaaatgaatttatgattggcgaaggacattatgatgtcagacttaaattacattcacgaaacaagaagcacacaatgtatgtacctttaagtgtcaatgcgaataaacaatatcgttttaacattatgttagaagatattaaagcgtatttacctaaagaaaaaatttgggatgttttcttagaagtccaaataggtacggaagtatttgaagtgcgtgttggtaatcaacgtaataaatatgcatatactgcagaaacaagtgcattaattcatttgaataatgatttttatagattaacaccgtatttcacaaaagactttaataacatttcgttatactttacagctattacattaacggattcaatctcattgaagttaaaaggtaaaaacaaaatcattttaactggtctggatcgtggttatgtatttgaagaaggtatggctagtgtcgtgctaaaagacgacatgattatgggaatgttaagccaaacgtcagaaaacgaagtggaaatcttacttagtaaagatattaagaagcgagacttcaaaaatattgttaagttaaacactgcacatatgacttactcgctaaaataaataataaatgccctcaaatctatgtgaactaacatgatttgagggttttattttactatttatgaaatgattatgacatttccctgattttcattttcatatacattaaattgtatacactgaaaatgaggaggtcgtctataatgataaataaaaatgacatagtagcagatgtagtaacagattatccgaaagcagcagatatttttagaagcgtaggtatagacttttgttgcggtggacaagtaagtatagaagcagcatccttagaaaagaaaaatgtagatttgaacgaattattacagcgtctcaatgacgttgaacaaacgaatacaccaggttcgcttaaccctaaatttttaaatgtttcgtcacttattcaatatattcaagcagcatatcatgaacctcttagagaagaatttaaaaatttaacaccttatgtgacgaaattatcgaaagtacatggacctaaccatccatatttagtcgagttaaaagaaacatatgatacatttaaaaatggcatgttagagcatatgcaaaaagaagatgatgttgattttccaaaactaattaaatatgaacaaggtgaagtagtagacgatattaatacagtgattgatgatttagtatctgatcacattgcaacgggacaattgttagtgaaaatgagcgatttaacatctagctatgaaccaccgatagaggcatgtggtacgtggcgactcgtttatcagagattaaaagcacttgaagtgttaacacatgagcatgttcatttagagaatcatgttttatttaaaaaagtatcataaataacgcgattagaaactgttggcaaagtaatgtcagcagtttttcgctatacttaacagaaatttagtgatatgaacagcattatttgaaaagaaaaatggtcaacttagcataaaaattgatatgaaaaattaatggtatagataattaaatagtagcgtgttttttaataatttattcatgaattttacatgcactattatgataaaataaacataattataatttactgaggtgctatcgtgctatcgctaacaatgttattacttgagcgtgtaggtttaattattattttggcctatgtgttgatgaatattccatattttaaaaacttaatgaatcgtcgacgtacatggaaagcacgttggcaattatgtattattttcagtttgtttgccttaatgtctaatttaactggtatcgtcatcgatcatcaacatagtttgtcaggaagtgtgtacttccgtttagatgatgatgtatctttagctaacacacgtgtattaacgataggtgtcgcaggattagttggtggcccttttgtaggtctatttgttggcgttatttcaggtattttcagagtgtatatgggtggggcggatgcacaagtttatcttatctcatctatatttatcggtataattgctggttattttggcttacaagctcaaagacgcaagcgttacccgagtattgcgaaaagtgccatgattggaattgttatggaaatgattcaaatgttgagcattttaacattttcccacgacaaagcatatgcggttgacctcatatcattaattgcactaccaatgattattgttaatagcgtcggtacggcgatttttatgtctattatcatttcaacattaaagcaagaggagcaaatgaaggctgttcaaacacatgatgtactgcaattgatgaaccagacattgccgtattttaaagaaggattgaatagagaatcggcacagcaaattgcgatgattattaaaaatttaatgaaagtatctgccgtagcaattacaagcaaaaatgaaatcttatcgcatgtaggtgcaggtagtgatcatcacataccaacaaatgaaatattaacaagtctgtctaaagatgtattgaaatcaggaaagttgaaagaagttcatactaaagaagagattggttgtagtcatccgaattgcccgcttagagcagctatcgtgataccacttgagatgcatggttctatcgtcggtacattgaagatgtattttacaaaccctaatgatttaacttttgtggaacgtcaacttgcagaaggattggcaaatatttttagtagccaaattgaacttggtgaagccgaaacgcaaagtaagttattgaaagatgctgagattaagtcattacaggcacaagtgagtccacattttttcttcaattcaattaacacgatttcagctttagttagaataaatagcgaaaaggcacgagagttactattagaattgagttattttttcagagcgaatttacaaggctctaagcaacatacgattactttagataaagagttaagtcaagtgcgtgcatacttatcactcgaacaagcacgttatccaggaagatttaatatcaatattaatgttgaagacaaatatcgcgatgtgcttgtaccaccatttttaattcaaattttagttgaaaatgccatcaaacatgcgtttacgaatcgaaagcaaggtaacgatattgacgtgtcagtgattaaagaaactgcaacacatgtacgtattattgtacaagataatggtcagggtatttctaaagataaaatgcatttgttgggagaaacatctgtagaatcagagtctggaactggtagtgctttagaaaatttaaacttacgcctaaaaggattatttggaaaatccgcagcattacaatttgaatcgacatcgagcggtaccactttttggtgtgtacttccttatgaaagacaagaggaggaataaatatgaaagcattaatcatagatgatgagccattagcacgtaatgaattaacatatttattaaatgaaattggtggttttgaagaaattaatgaggcagaaaatgtaaaagaaacattggaagcactactgatcaatcaatatgacattatatttttagatgtcaatttaatggatgaaaatgggatcgaattaggagctaagattcaaaagatgaaagagccacctgcgattatttttgcaactgcacatgaccaatacgcagtacaggcatttgaattaaatgcgacagactatattttgaaaccgtttggtcaaaaacgtattgaacaagcagtcaataaagtgcgtgcgactaaagccaaagatgataatagcgcaagtgcaattgcgaatgatatgtcggcgaattttgatcaaagtttacctgttgaaatagacgataaaattcacatgttaaagcaacaaaatattattgggattggcacacataatggtattacaaccatacatacaacgaatcataaatacgaaacaacagagccattgaatcgttatgaaaaacgattgaatcccgcttatttcatacgtattcatcgttcatatattattaatacgaaacacattaaagaagtgcaacaatggtttaactacacttatatggtaatattgacaaatggtgtcaagatgcaagttggacgttcatttatgaaagattttaaagcgtcgatagggttactttaacagtaatccttttttttatgcattttacctatgatattttgtatttcggactaaaatttacgcaaatcgaagtgagccatctatactttagttaaatcaaacgtaggaggcaatggtcgtgaaacaacaaaaagacgcatcaaaaccagcacacttttttcaccaagtcattgtaattgctttagtactctttgtatcgaaaataattgaatcatttatgccaattcctatgcctggatcagtaatcggtttagtattattatttgtattattatgtactggtgctgttaagttaggcgaagtcgaaaaagtaggaacgacactaacaaataacattggcttactcttcgtaccagccggtatctcagttgttaactctttaggtgtcattagccaagcaccatttttaatcattggactaataatcgtctcaacaatactattacttatttgtactggctatgtcacacaaattattatgaaagttacttcgagatctaaaggtgacaaagtcacaaaaaagatcaaaatagaggaggcacaagctcatgattaaccacttagcactaaatacaccttacttcggaatactgttatccgttataccatttttcttagcgaccatattatttgaaaaaactaatcgtttcttcttattcgcaccgctatttgtcagtatggtatttggtgtggccttcctctatttaacaggcattccgtataagacttacaaaataggtggagacattatttacttcttcttagaaccggcaacaatctgttttgcgattccgttatataaaaagcgtgaagtgcttgttaaacattggcatcgtatcatcggaggtattggtatcggtacagttgtagcgttattaattattttaacttttgcgaagttagcacaatttgccaatgatgttattttatcaatgttacctcaagcagcaactacagcgattgcgttaccagtatcagctggtatcggtggtataaaagaattaacatcattagcagttattttaaatggtgtcattatttatgccctaggtaataaattcttgaagcttttccgaattactaaccctattgcccgaggattagcacttggaacaagtggtcacacattaggtgtagcaccagccaaagaattaggacctgtagaagaatcaatggcaagtatagctttagtgttagttggtgtagttgttgtagcagttgtgcctgtctttgtagcaatattcttctaaaacgaaaaacctaagcaagataatagcaatttgagccattgttattatcgtaaaaaaacgtctatactccagtttataactgggatatagacgtttttatgtatttattactttttactaggaatataaaactgtgcatgacgataatgaaatacgatgtcagacgaatcaaagggtttgccagtcattgtataaaaagtctggtggtaacgtaaacatggttcacctgtagacaattgtagtaatgaagcttcacttgaagtgagtttatctacattaaagaaaatatctgaaaaaccaatacgaagtttcatgtttgattctaaataatcgaagatagagcccttagcaatatcatcatttaaatatttcacgatttctttatgataataagaatattcgatacataaaacatcatcgtccacgaatcttaatcgctctaaatagtagacggtatcatctgcatttaattggagttcatcttgtacagatttaggtggcgttgccatctccttaaaaacaagtaccttacttgtcattcgatgttcacctaaacttttagagaaaccattagtcttaaagacgttgatacgattggcatctgcaatatttctcacataaataccactgccttgtgcttgatagatcaaaccatcttgttccaataagcctaatgctttaatgatagtactcttacttacttgataacgttcttttaattgcgtcacgcttggcaatttatcaccgggtttgaatttagattgatgtataaacgcattaagttgcttagcaatatgttcatactttaacaatattctgtcctcgtttcactttgtctgtaattattatagcacaaaatattataattgtatcggcgtttacaaattgaaccggtacaattataattggaggtaagtaaatacattttcattctactatcaagttgagggggtaatatttatgagcaataaatataaagaacaagcccaagacattcttacagctgtaggtggtgtcgaaaacattgttgatgcaacgtatgacacgaagtgcattacaattcatatgcaacatacaattccttctacagcaaatgaagtgaaacaaatagttgatgtgacatctgtagcagaaaatgatgcgcagttagtcataaaattaaatggaaatgtcgatgaagtgtatcagcaattacagcgattaattaagaatgctaatgtcgaagagagtgagaatactgacaatattaatagccaagatacaagttatatacctcaagtaaaagtaacaacaccaattttagtgaaagcaccaatcgctggtcgtcgtattttacttaaagaagtaagagattcaatttttagagagaaaatggtaggcgaaggcttggcaatcaaagctcatgaagaatccaaagtaatcgcaccgttcaatggtttaatatctatgattgtaccaactaagcatgcagttcgtattcaatcagaagacggtgtggacatagtcattcatattggcgtgaatacagttgacttggaaggtaaagggttcaagtgctttgtaaagcaaaatgatcgtgttgaagcagggcaaacgttgttacaattcgaccagcaatatatacaacaacaaggctacaatgctgacgttattgtcgttattagcaactctgccgatttaggaaaagtagaactgacaatgaatgaaatcattacgactgaagatgttatttttaaaatatttaaaaactaggagtgtgttgtaataatgaccaaattaccgcgaaattttatgtggggtggcgctcttgccgcaaatcaatttgaaggtggatatgataaagggggtaaagggttaagtgtaattgatgttatgacgagtggtgcacatggcaaagcacgtcagattacaaagtctatagatcaaaatcactattatccaaatcatgaaggtattgatttttatcatcgttataaggaagatattgccttgtttaatgaaatgggattgaaatgtttacgtacgtcgattgcgtggacacgtatctttccgaatggggatgaagatgtgccaaacgaagaaggactcgccttttatgatcgtatctttgatgaattaattgcacaagatattgaacctgttgtgacgttatcacattttgagatgccacttcatttagcgaaacattatggtggatttagaaatagagaagttgtcgattattttgtgcattttgcgcgtgttgtatttgaaagatataaagataaagtgacatattggatgacgtttaatgaaattaataatcagatggacacatcaaatcctatctttttatggacgaattctggggtagcattgacagaaaatgataatcctgaagaagtcttgtatcaagtagcacatcatgaacttttagccagtgctttagcagttcgtcttggtaaagagattaatccgaagtttaagattggaacaatgatttcacatgtacccatttatccatattcgtgtcatccgaaagatatgatggaagcacaaattgcgaatcgcttacgtttctttttcccggatgtccaagtgagaggttattatccaagctatgctaaaaaaatgttggcacgaaaaggatatgatgttggatggcaagaaggggacgacagtattttacagcagggcacggttgattatattggctttagttattacatgtctacggctgtaaaacatgatgttgatactacagttgaaaacaacatcgtcaacggtggtttgaatcattctgtggagaatccgcatatcgcaacgagtgattggggttgggcgattgatccagatggcttaagatatacattgaatgtgttatatgatcgttatcagttaccactttttattgtggaaaatggttttggtgcagttgatgaagtggtagatggacatattcatgatgattatcgcattgaatatttaaaagcacatattacagcagcgatagaagcagttgatcaagatggtgtagatttaatcggttatacaccgtggggaatcattgatattgtttcatttacaaccggtgaaatgaagaaacgctatggtttaatatatgttgatcgagataatgatggtcatggcacgatggaacgcttgaaaaaagattcgttctattggtatcaacaagtgatagcatcaaatggagataaattataaaggtatattataagtattttagggttagagcccgagacataaattaatatagtaggacctacagtgttatattggcgggccccaacatagaagctggcggaaagtcagcatacaataatgtgcaagttggcggggccccaacatagaagctggcggaaagtcagcttacaataatgtgcaagttggcggggccccaacacagaagctggcggaaagtcagcttacaataatgtgcaagttggggaaggacaggaataaattttgcgaaaatatcatttctgttccaatcccgtgatgttaaaatttttaaaaaaataatgccactaactaagtatgtatagtgttaatgtttgagtgtttatgaaagtctttaaccaaaattgatgacttactaatcaacgataacgatattgttaagtagatgattagtgtcacaaagaaattaaagtagcagtcaaacatagatacaaagtacggttagtggcattatatttagtcctcttttttagcgacaaaagtaatataattcatatctttacgcaatttagtcatcgttttaaacattttacaaaacattggtcgattttctttttttaaagcattgttgataatctttatagttccaacaataccttcgtcataaattaaaccttttggtgtcattaaactcattggaccagtatgataatgcacatgattaaaaccagcttgattatataaatctaaccagccaagtttcgtctgcggtgagacattgacattaattgctgcagataatgatttaactacatgtgtggcatgtgattcattaacgatgacaatatcatgtgttaacaagatacccccaggctttaagactcggtagtactcgcgtaatgctttttcctttatggtgatgggtaacattgttaacattgcttcatttaaaacgatatcgaattgattgtcatcaaagggcaatttaacagcattcgcttgttgaacttgaatatatgattcaagacctgctgctgaaatattttcctgtgctttttctaatgctttcttatttatatcaacgccttgaatgtgacagccatatgtatgagctagataaatagatgttgtgcacatattacatgccacttctaacacttgtttatcttgtgaaaatgccccttgttgtattaaccaatctgttgcttctttaccaccggggcgtagacgagtttttcctaatttagctaaaaatgtatgaccagcttctttagacatagcataacctccttttaattgataattattatcattaatatagcatatttatatgcaataatttggaagttaaaaagattacaaaaaattgtcacttcatttataactaaacatgagtcaacaagcataggtttagtggaaaattatttctaatagatgatgttttataaagataaaaaagcacagccatgatatacgaatgttgcatgttatatgctaaaccttcatatcatagctgtgtttgcttcatttaaacttgatttacttcttctagtagaggaatagatgcttgcgcgccgtgtttttgtacagtgagtgagctcgctttattaccaaaatcaatagcatctgctaagttatcttgcgacttgtttaagcgactgacaaatgcaccaataaatgtgtcgcctgcagcagttgtatcaatcgcatttactttataagcttcgatgtgttggctttgatttttagtagcaaaatatgtaccttgcttacctagcgtaatcaaaacagtcttaatgcctaaagataaaaagtaattggcattgtctttcatagattgttcattagttactttaatcccagataacaattcggcttctgtttcgtttggcacaataatatcgattaatgataataattcattaggtaatgctttcgctggtgcaggatttaatactgtcgtcacaccatgtgccttggcaatttcaaatgcagatataatagccgggatgggtacttctaattgtgcaacgacaaagtctgcattgattatagcgtcttttgcgttaataacatcttcaggtgtcatcgtcatattcgcaccaccataaacatagatggtgttttgtccttctgcattcacagtgataaaggcttggcctgtttttgcttcagttgatttgataatatatgatgtatcaatatgagccgctttaaaatcttctaagatgaaatcagcaacgccatcagtgccaattttagtaataaatgttgtgtctgcttgcatacgtgcagtggcaatagcctggttggcacctttacctccgccgaatgctttttgtgcttcttcaacatgtaatgtttcgcctggttgtgcatatctttcaactgttaaaaattgatcgacattcgttgaacctaaaataacaactttgttggtcatgtgtatgctcctttcaagttataacttttaaaaagtaacattcgattctaatgcaatattagagtagggcgttgtttcaccagtacgaatattacctttatttaatgggtgagctaagttacttttcatttcttcgtgaggaatgaaaatgatttcgatttccgatgaaatcaattgtttaatttgttgcaattgtgtagggttatgttcttttatttcttctgctaagtatattttttggatttccatttcttctaacactgtagctaagacatcaataaagcgtggtaagtttttagttacagctaggtcgatacgacgatgatcatttggaattggcatgccagcgtcattaatcgttaataaatcaaaatgaccaattgtcgcgattgcttttgaaatatgttcatttaaaacagctgattttttcatgacatctacactccttattttataaatactgtaacagaagcggctactaaaatgagtactaagccgatgattgtaataaccatttcttttgacgttttatgttgttttaagaaataaataccagttaatgtagcaagcacaacggatgtttgagaaagaataaatccagttgctaaaccattcatattaggttgtgctgaaataagatatgttaaagcaccaaatgcaaagaagaaacctgaaataatttgtaaccacgtaattttattacggaatggattctctgctttcatattcataaagccataaatgactgcaacaattaccatacccattgcttgaggtaaaaaggcagttaggccatcaatagaagttgcttgcggtgcagctgaatataaccagtatccaaattcaccaattaacagaagtaccactgcacgacgtaaatttttggcgttacttgcttctttgcgttcactccaaactgtcatacgcgctccaattagaataacgactaaagctgtaaatccaatgattttatgaccaatgcctggccaatttcctaatgcaaagacaccccataaagatgcgcctaataattggaatgctgttgtgactggcatggcacgagatgagccgactaattcgaacgctttaaatgtaatgatttgtccgaatccccatcctgcacctgataataaggcgaatagcaaattggttccagtagggaagccacttgatgtgactacggctaatataatagcgaagattaacgtacctacagtagcaccgataatttgatgtacaggtttaccaccaaactttgaagcgactgttgggaagaagccccagccaattaaggggcctaacccgataagtaatgcaacaatgctcatgttatacacctcacgatttgtttttagtaaaacgttttaccagtgccatcgtaccatttttatttgtaaaatgcatgcgttttcataaaaaatgaaaacgtttaaatcatatttaaaaattcatacattattattttaatttcttagtgaaataattatgattaaaaaccctcagcattaaagcaacgctaagggcataacaatgatgagtatatttcggaagatacgtagttagtttgaaagatgatagccagttgttgcacgaatttttaaagtcgttggtaattcaatcatatcaatggatttatctaagtgctgtaatcgttgaagtaataaggttaaagatgttttgccaatatcagttataggttgtgccacagtagttaaaggtggcgagacgtacgctgcataatcaatgtcgtcataacctattaatgagatatctttcggaatactgatgccatgttcaattagtcctcgtaaaatgccaatagcgagttcatcgttaatagcgaagattgcagtggcagattgaaccatgatgtcatcaacaatggttagcccaccgcgcttagataattcagtatggacgatttgtggttctggcaattgattcgcgcgcaaagtatcaacaaatccagcgacacgagtcgacatattcgccatcatgtcatatggtgcaacaatcatcatattgttgtgaccgagttctattaaatgttgtgctgcaagttgtccgccttgatattcatttgtccgaacaaaatctgtatagccttgatggtcattttgatccagtacgacataaggtacatgatgtttctttagataattatttagggcgtccggggatgaaatgtattgtgcgataattaatccgtcaatacctcgatcaattaaatgtttaatattgtcatacaaatcagttgctgtagatgttaaaaagcataaatcaacatcagatggtttatggtcatgaatactttgcatcagtgctgagaaaaacggatttgttaagctaggcaaaatgacgccaatagtttgaattttactgccgcgcaattgttttgcatgtttattaggggcatagcctaaacgttctgaaacagcatgtacgttttttatcgttgttgcggaaaaacgactatcattatgatttaaaatatgtgacacagttgtaactgatacaccagcttctctagcaacatctttaattgacacttttttcatattatattccttctctttattgtgtaattaatcatacagttatatacccgattattatattcatcatatcatgataaacatttgatgacatatgaagacgtgaatgacttttattgtctacaaacagacgcctatagtatgcgattaaggttgaggcgagagaatatattattaaggttaaataacttttaatgattatgataacaagaattttaaaatgtttattgtgatgaaaaatacaaaagtgattattttaaataataaaatatttgtttttgaaaaaagtattaaaaaacataacgaaatgatgtatattgaactatgtgattgaaaaaatttttaattaaggcttgttaaaacataagagaggatgtttttaaatgcaattcaaattaaaagaagaagagattattagttttttagaattgaaatatccagaaaaagagttcgaatatggtcgtttgttagttggacaacataaacgtgatgatttagatgtttattactttggtgatacgtttttaatgtgcacgattatttcattcaagacatttgaaattaaagaaacagtagaattatcatatgatgctgttaatcgtattgtgttaaaagatggatggttatttagaaaaatgagaatagaaacaatgcaaaaagtgttaaaatacggtacatctaaattaatgttaactgattttcaaaaagagaattataataaatatattcaaggtcagaaacaacgcgtgatatttgaaaatggccattttgtctaattgatagtgaatataattagagtaagcgaagaacagagaaaaacgttcttcgcttatttttcttgaatttcttgtatatcattttaaagtgatacagatatttcgaaacatgatgcttctattatatttaagatttaaccgtttttggaatgatcatgtatgcagacaatgagccaaggatcatcaatacaatgctgacgataaatgttacggttgcagctacacttggtgcatagtttagttgtaacatactgaaaactgtagtacttagtgctataccaaaggcgccacctaatgtaccactcattttatataatcctgtagctaaaccaactttttcatttggcatactgaaaattgcaattgtaaggccgggtgttgcgactaaaccatttccaattgcacaaatgacgaaaccaatgataactgcaatgacatattgtgatgccgataattgagtcatgctaataatagtgatgccgatgacagggaacaacggaccaatgatgagcatcaatttgccaccgaaacgtaatgttgctttttcacctaaacgaatcatcgcaactgccacaatggcatatggcaatgtaacaagtccagattgcgcagctgataaaccaaggtgtgtttgagcatatatgaaaaagaccactgttacgcctaggccactatttaaaacaaagttatttaaaaatgcaccaatgaacggacggttgcgtaatactgagaaatcaataaaaggtacttcatgtcgacgttcgatgatgatgaatatcaacgtagtgatgataaaaatgctcagacaaatgaatgaaaatgtactaaaccaaccttgttcgaatccttgtgttaacaataatgtaaagctaccaatcataacagcgaaaatcgacatacctttgtaatcgaatggatgacgatggctatgttgacttactttttcaggtgtgccttttagaagtaatatggcaatgaaagcaatgactatactaatgatgaaattcgtttgccatccgaaatttgtggcaattaaaccgccgataacaccagctaggccgatgcccccaacagtactaatcattagataactaatcgctcgtcttaaatgttctcctttaaattgattatttaaaacgccaactgttgaaggtaacaagatagctgctgatagaccttgtaaaattctaccgatgatgagcagtgcagtgatgtccgatataattaatagaagagatgcaaacatactgattatgagacccatgtatgtcattctcagttgtcctattttatcagcaatatcacctgcagccaccatgaagatacctgtggcgaaggaagttaaactaatagataaatttaacacggcaggagaggtttgatacgtttgaccaacgagaggtcctatattaataaatgattgtgcaaacaaccaatatgttaatgcagacaacataatcgcaataataatattactgcgtggtgaagattgtgtgttattcacagatgtcactccttgtaaaaattaaatatagaaagtcatgagatgaagtgaacggatgtatagatgatcgttcactcacacattagtcatgatttccttacatatcataccacagttattgagaatgaatatcaattaattgcttgtatgattgaatttttatagtatgtttaagtgaaacagctttatttgaaagtgattaaagtaaatgaaggtacagaggagtgagaacaatgtgcacaggattcacaatacaaactttaaataatcaagtacttcttggacgcacgatggattatgattatccattagatggttcgccagcagtgacgcctagaaattatcgttggacatctcgcactggcacgacaggccaaacgcaatatggctttattggtacaggaacagatatggaaggttttatttatggtgatggtgttaatgaacatggcgttgccatttcaacacaatatttccgaggttatagttcatatggatcaacacacaaagcgggcgcgatgaatattacgcaaaatgaaattgtgacatggattttgggatatacaacaagcattgaagatatgaaacaacaagcatcccaaatacatgttgtagcggtatatttaaatgacatcggtgaagttccgccattgcattatcatgtttccgatgcaactggacattcagtcgaagtttcatttaaagagggtgaagtggttataaaagataaccctattggtgtcttaacaaatcatccagacttagattggcattatagtaatttaagacaatatatcaatatttctccttatccagcaacagcaaagttattggaaggtgtaacgattgaacctttaggcaatgaagcaggtacatttggattgccaggtggatttacttcaactgagcgctttgtgagaatggcatttatgaaagcaaacattgctcaaaacaatgataaagaaatggatttaatgaatgcattttatttattagatgcggtaaatataccgattggaattgtacgtccgcatgatgctgacaatcactatacgatgtatcagaccgtaataaatttaactacaagaacgttatatattaagtattatggcagcaatgaattagtagcattaaagctcacagatgatttaattaatagaaaagatatgacgatttttaagcctgagaagcatatcactattagaaagttgaatgacaatcaatagcgattgataatggaatttggttgatatgatttgatggatgattactatcatacattagcgttgaatcgcgaacatggacgaacgattagttgttagttttgaaaatttataaaaggttaaacgaatgcagtgagagatgtcattttaatatcaatgtatggctattttgtaatgacaatgtaatgagtttagtaaaacatttcgggaatattaaatagttggaaaatgagaattaaatcctttactcagttgtctaattcttttagtatgtgcagtacagtttaattgaaaactaactttaattttaatggaggatgttttatacatgaaaaaattaacagcagcagcgattgcaacgatgggcttcgctacatttacaatggcgcatcaagcagatgcagcagaaacgacaaacacccaacaagcacatacacaaatgtcaacacaatcacaagacgtatcttatggtacttattatacaattgattctaatggggattatcatcacacacctgatggtaactggaatcaagcaatgtttgataataaagaatatagctatacattcgtagatgctcaaggacatacgcattatttttataactgttatccaaaaaatgcaaatgccaatggaagcggccaaacatatgtgaatccagcaatagcaggagataacaatgactacacagcgagtcaaagccaacagcatattaatcaatatggttatcaatcaaatgtaggtccagacgcgagctattattcacatagtaacaacaaccaagcgtataacagccatgatggtaatggaaaggtcaattaccctaatggcacatcgaatcaaaatggcggattagcaagtaaagcgacagctagtggtcatgcgaaagacgcaagctggttaacaagtcgtaaacaactacaaccatatggacaatatcacggtggtggtgcgcattacggtgtcgactatgcaatgcctgaaaattcaccagtttactcattaactgatggcacagtagtacaagcaggttggagtaactatggtggcggcaatcaagtaactattaaagaagcgaacagtaataactaccaatggtatatgcataataatcgtttaactgtttcagctggtgataaagtcaaagctggtgaccaaattgcatattcaggtagtacgggtaattcaacagcgcctcacgtacacttccaacgtatgtctggtggcatcggtaatcaatatgcagtagacccaacgtcatacttgcaaagtagataatacagtaaatcccaagttacgatatcatacgcaacttgggattttttcgttttaataataggtataagcccattgcttgtcctctaaaacatgttgataaaaaggatcttggccaattaacttgatatcatctgcaagtgcttcaacttcatctaaatgatgggtagttaatataattaaacatttagatttcataatgttaagcagttggtggatgtcatgtctagatttcaaatcaataccaactgtcggttcatctaaaattagaattcgaggttgacctagtaaacctactaatatattaattttacgtttattcccaccggacaatgtagatactttggcagacgtatcatcaaaatttaattgctgtaaatattcgttgatagttgtatcgttaattggatttttacaaagtgatttaaaaaaattaatgttttcagccactgtcatgtgttcaaataacgcaatgtcttgtggcacataaccgatgtgattttggatttgtctttgattccatttttcgccgaaatagttgatagttccatcattagctttttcaataccagcgatcatacgaagtaatgttgattttccagcgccattatcaccaagtaatacggttaaacgattactatcaaaggacatggttaaatgattgaaaatctgtttgttacggtaacgctttgaaaggttattaatttctatcatcagttacgctcctttacatgaaaataatcaagtatacgatacccatagcaagtgcatatataaatgtcatgaataatcgatgacttattgtttgaatatggaataagataaagacgatacctatctcataaatcaatataagtaacagtgattttaagtaaaatattaagctgagtggttgagacaaatatagactaactgccaatagtaccaacaataacaagatcgtatgtgtcattacataagtactatatagtttgaaacgggttaaatgatattgtgataatcgttgcaatgctgcttgttggtttaaacgataatgaagtactacttgaacagcgctaacaaataaaatcacagcaaagattaagctaattgaaatagattgttgtgcttgtttagtaagcgacacaaatttgattttagattcaggtgtatgtttatgataggacttgttgatagcatcgatggattgatgttgtttcatatcctcaaggtgttcataaataatgttaggaatttgctgttcatataatgaactactaacaatttctacagcaataccacctataaagtcatctctaccatataactgtatcgtttcttttaaacggttctcttttaatttttgagagaaacctttaggaatttgcatacttaaaatagcttcctttttagtaacatcatcttcaatatagctttcatcttcatcgacttttttaatagttacatagtcagattgtttaattttattgacgaatgattttgatgcagtggtttggtctaaatcttgaatggtaatcggtattttgaagttgtcatgtgctacacggtaaccgataccaataagtacgagtgcgatgacaatggttgttacgagcaagatgtattgtaaccattgcttgaacacaacaagttgtatataaggcttcattgacgatacctccaaaccaatacagctaaattaattatcaaaagtgcgatgaaactaagatagaaactagggtgcagttctaaaatgtagttgtttaaaataatttctaacaattgatttgttacaactgcgaacggttgaatattgaaaacgccatttgctatatgttgtaaaaaaatcgtaggtattgttaaaccagataacaccaggatgacaatagctaatatgactttactaatactattcaacaagcctgttgttaaaagttcgatgagtaataaccacagtattaaaaaggtaacataatagcttaaatgaatggctaacgttggccaattatataattcaaaggtattcggaatactgaacacaatccaaactacaccaacgatactccataacatagtataaaaccatgtaatcaacacacgaatgattaataaacgctctttagaaaaatgaaacattttcaatcgcgctttcaatacagtatcttgattcattttcaaaactgtaaataaagatagtgcaaagatgaataccgttgttaaaaaacctgtaattgcataataactgcccgtatcgtataaatgaatcggttctaagttaaatgcacctgaacggtttaatcctgtaatcagcaaatcagtcataacattgatactgtcagaatgtgatgctttcggtgctaagtcttgaaaagctaagatgccacccattgatcgcataagacgttggtaaacagaatctgttagctgagatagcacgacacttttcatggattgttgatcatatgtatatactgaaattggtagttcgccttgtttataaaatgccttggtcatacctttatcaaaaacaaaatagccttgaagtttatgtttttttaacaaagtatgtgcttgcttatcatcatatgccttaatgctcacgttttttcctaggttactccctttaccaatagagtttaagattaatttcgtttcacttgattgatctttatctacgacacctatattaaaatgattgtcatcttctgttacatgttggatcgtcgttaatgtaataacgagtgccgctaatataaatagtaaatagataatcaaataccactttttcaataaaaaagagtggtagatgcgaaacaaatgtattgttttcatttaaccactcctccaatgataagattgaaaggcaagatgaccttccaatcttatttttatattttagttatttagatgccttttttaaaattgattcaaacattttgccgccatttttttcgatttctttttcaagtttttcacggtcttttgaagatagactattgaaatctttcgcaccactatcatcaaaatcaatatctgctttcaattttgtgctagattttaaaatgaaattaattggttcttcagcatatttgatgccgatatttaacgtagatttctgagtgttatttttgacgtcagaatctatattattttcaaaagtgaattcattttcgtcgctatatttatctaatgcgacagtaattttacctttatcttgacgttttgtgccatctactttttcttggttatctaatttgatttttgattcatcatattctgtctttttaccaaattcgtatttatcactgtatttattgtctttttccttagaagatacgcctttaattgtatatttcgcttcagcatacgtgtatttatcttgatcgaaatcaagtgcgtaatctagttttaacttatcgtcttctaaagtattagtacctttgattttagttttattattttctttgtctgtaatagtaatttctcgttttacaatcgtatgtttttcggtataaattttagattgaattttagcaaattcatcctttttagtttctttgacatcgtcaattgcttttttgatgtctttttcaaagtcttttgtagcaccttgttcttccattaattttttaaggtctttatcctttttagcttcttctaatacagctaatgtaatttttttagtgtcagctctgctaagtgttaacgtgacaggtctaactttgtacttttcaccattaaccttaatttcttcttttttacctttatcaaaattatcgtcatctaatttgtcgacaataagttcggaatatttttcggcaattttgctgtagtcactttgttgtgcttgagcattactaaaaagagtatttaaatttagttgttggtttgtaataccattttcttttgctgtttcttcatcttcacctgtaagttttgaataagttgataataaatcagaattattaacactatatttccctttaaataatggtgattcgaaataatgcttatctttatctgcagctaactggaatttccctaatgcagagtctgctattgttggttcaagattaatcattgatttctcttttttaggatcatgtccatatgacattttaattttcgaagcattaacaacagatttaggaataccaagccccttaacaatttcatctgatgcatctgcgcttaattctaatgaagataaaaatgaattatctttcatcttttcttggaacttcacttcattttcaaaacggtcattaaaataatctttatacatttttgctgtttgttgttcactttttaggtatgtatttttcggtgtattagcaaaaaatgcataaactccccatgcgattccacctattaataataagacaacaataataggaattataatttttagttttttagacattttgtttcctcccaattatttatgagttaatcatatcagaacaatacattttattaaatggtttattttaaattttgtttaaattaataggattttagttataataatgtttaataagttattggaaatctaataaactacaaaaaatattttgattacataatgattatttaaaaatgtcggttaactttaaggtgacaagttattgcaattttgaaggtagacatcatattttataatcgaataacatacaaaataaagcgaccaattttgcagtgttacgaattgtaaactgcgaactggtcgctttttattgatgtcatgattaatttaatggatgtaattatatgatgaaacttctgaagcagagatggttcttgatgaaacgatatattcaccaatccagttcatttctgaaattagaatacttccatcaatattaactttttcaacgtaggctacatgaccaaatggaccatttactgtttgtaaaattgatcctcgtgttgggtgtctatctactttgaagccattgcttgaagcttggcctgcccagtttttagcatctccccaaaatgtactaatcgtgtgtccatctttggcacgtttatcaaagacataccatgtacattgtccagcagtatataagttgttcttacttgtgataagaggctgatcaatgattttaccgttacctaatgctaaaggtttaccgtcagcggtctttgctttgtcattaaattcggcgatttgtaattcgtcatacaattcgtctaaatcgatgcctgtaataagccctttgttatcttttgaaaaagcgttatttaattcatcgtcattgtcttcgacattcggtattgctggtgtcaaaggattgcttggtgacgtttgaggcggtgtgtgtgaatcaattgcgtcattaatgtgcgtatactgaccacttaatgaagaatggtactgattgttgttaagatcacgttgatttgcgtgttgatgattgtcgtttgtacgtgactggttttgatgattgttgtttggcgtgttgtttttgtcatatgtataagtatacgcgccggtgtctttattcactttgaactgtgcgtttgggtgtgctttctttgcttcttctaatgttttgctatcattcgtatatgcttgagccgagttaggcgacatactaaataaagtaagagttgtcatcgtcagtaaaattgttttcttcataataaccatttaatcctttatgtatttaatttaattttagtatacacatttatattacaaaaatgaatggttaattaaaaatatatgggtatattcaatatatttatttaaaaaaagctaaaaatacttaaaaaactatatacatatactaataatttatatattatttgagtaaggagcactttttcaaaaaatagtgtccctaaaaagttttgataaacttaaaatattcaggaggtttctagttatggcaatgattaagatgagtccagaggaaatcagagcaaaatcgcaatcttacgggcaaggttcagaccaaatccgtcaaattttatctgatttaacacgtgcacaaggtgaaattgcagcgaactgggaaggtcaagctttcagccgtttcgaagagcaattccaacaacttagtcctaaagtagaaaaatttgcacaattattagaagaaattaaacaacaattgaatagcactgctgatgccgttcaagaacaagaccaacaactttctaataatttcggtttgcaataagcattctgaaattggcaaagtcacattttctaatgtggctttgcttatcattttttaagaaaacaactgaaaggaaataagcatgaaaaagaaaaattggatttatgcattaattgtcactttaattattataattgccatagttagtatgatattttttgttcaaacaaaatatggagatcaatcagaaaaaggatcccgaagtgtaagtaataaaaataataaaatacatatcgcaattgttaacgaggatcaaccaacgacatataacggtaaaaaagttgagctgggtcaagcatttattaaaaggttagcaaatgagaaaaactataaatttgaaacagtaacacgaaacgttgctgagtctggtttgaaaaatggtggataccaagtcatgattgttatcccagaaaacttttcaaaattggcaatgcaattagacgctaaaacaccatcgaaaatatcgctacagtataaaacagctgtaggacaaaaagaagaagtagctaaaaacacagaaaaagttgtaagtaatgtacttaacgactttaacaaaaacttagtcgaaatttatttaacaagtatcattgataatttacataatgcacaaaaaaatgttggcgctattatgacgcgtgaacatggtgtgaatagtaaattctcgaattacttattaaatccaattaacgacttcccggaattatttacagatacgcttgtaaattcaatttctgcaaacaaagatattacaaaatggttccaaacatacaataaatcattattgagtgcgaattcagatacgttcagagtgaacacagattataatgtttcgactttaattgaaaaacaaaattcattatttgacgagcacaatacagcgatggataaaatgttacaagattataaatcgcaaaaagatagcgtggaacttgataactatatcaatgcattaaaacagatggacagccaaattgatcaacaatcaagtatgcaagatacaggtaaagaagaatataaacaaactgttaaagaaaacttagataaattaagagaaatcattcaatcacaagagtcaccattttcaaaaggtatgattgaagactatcgtaagcaattaacagaatcgctgcaagatgagcttgcaaataacaaagacttacaagatgcgctaaatagcattaaaatgaacaatgctcaattcgctgaaaacttagagaaacaacttcatgatgatattgtcaaagaacctgatacagatacaacatttatctataacatgtctaaacaagactttatagctgcaggtttaaatgaggatgaagctaataaatacgaagcaattgtcaaagaagcaaaacgttataaaaacgaatataatttgaaaaaaccgttagcagaacacattaatttaacagattacgataaccaagttgcgcaagacacaagtagtttgattaatgatggtgtgaaagtgcaacgtactgaaacgattaaaagtaatgatattaatcaattaactgttgcaacagatcctcattttaattttgaaggcgacattaaaattaatggtaaaaaatatgacattaaggatcaaagtgttcaactcgatacatctaacaaggaatataaagttgaagtcaatggcgttgctaaattgaaaaaggatgctgagaaagatttcttaaaagataaaacaatgcatttacaattgttatttggacaagcaaatcgtcaagatgaaccaaatgataagaaaacaacgagtgttgtggatgtaacattgaatcataaccttgatggtcgcttatcgaaagatgcattaagccagcaattgagtgcattatctaggtttgatgcgcattataaaatgtacacagatacaaaaggcagagaagataaaccattcgacaacaaacgtttaattgatatgatggttgaccaagttatcaatgacatggaaagtttcaaagacgataaagtagctgtgttacatcaaattgattcaatggaagaaaactcagacaaactgattgatgacattttaaataacaaaaagaatacaacaaaaaataaagaagatatttctaagctgattgatcagttagaaaacgttaaaaagacttttgctgaagagccacaagaaccaaaaattgataaaggcaaaaatgatgaatttaatacgatgtcttcaaatttagataaagaaattagtagaatttctgagaaaagtacgcaattgctatcagatacacaagaatcaaaaacaattgcagattcagttagtggacaattaaatcaattagataataatgtgaataaactacatgcgacaggtcgagcattaggcgtaagagcgaatgatttgaaccgtcaaatggctaaaaacgataaagataatgagttattcgctaaagagtttaaaaaagtattacaaaattctaaagatggcgacagacaaaaccaagcattaaaagcatttatgagtaatccggttcaaaagaaaaacttagaaaatgttttagctaataatggtaatacagacgtgatttcaccgacattattcgtattattgatgtatttactatcaatgattacagcatatattttctatagttatgaacgtgccaaaggacaaatgaatttcattaaagatgattatagtagtaaaaaccatctttggaataatgtcattacgtcaggtgttattggtacaactggtttggtagaaggattaattgtcggtttaattgcaatgaataagttccatgtattagctggctatagagcgaaattcatcttaatggtgattttaactatgatggtcttcgtacttattaatacgtatttactaagacaggtaaaatctatcggtatgttcttaatgattgctgcattgggtctatactttgtagctatgaataatttgaaagcggctggacaaggtgtgactaataaaatttcaccattgtcttatatcgataacatgttcttcaattatttaaatgcagagcatcctataggcttggcgctagtaatattaacagtacttgtgattattggctttgtactgaacatgtttataaaacactttaagaaagagagattaatctaatgttgatgaatagcgtgattgctttaacttttttaacagcatctagcaataatggcggacttaatattgacgtgcaacaagaagaggaaaagcgaatcaataatgatttaaatcaatatgatacaacgctatttaataaagacagcaaagcggttaatgatgcgattgctaagcagaaaaaagaacgacaacaacaaataaaaaatgatatgtttcaaaatcaagcgagtcactcgactcgcttgaatgaaactaaaaaagtgttattttccaaatctaacttagaaaagacttcggagagtgataaaagcccctatattcaaaacaagcaggagaaaaaaatattcccgtacattttgatgtctgtaggggcttttttgactttaggatttgtcattttttcaattcataaagggagacgaacgaaaaatgaatcagcacgtaaaagtaacatttgattttactaattataattacggcacatatgacttagcagtaccagcatatttaccgataaaaaacttaatagctttagtattggatagtttggacatttcaatatttgatgtcaatacacaaattaaagtgatgacgaaaggtcaattacttgttgaaaatgatcgactcattgattatcaaatcgctgatggagatattttgaagttactataggaggaaaaatagatggttaaaaatcataaccctaaaaatgaaatgcaagatatgttaacgcctttagatgctgaagaagcagctaaaacaaaattacgcttagatatgagagagattcctaagtcttcaattaaaccagaacattttcatttaatgtacttattagaacaacattctccatattttatagatgctgaattaactgaactacgtgacagtttccaaatacattatgacattaatgacaatcatacaccttttgataatattaaatcatttactaaaaatgaaaaattacgttacttactcaatatcaaaaatttagaagaagtaaatcgtacacgctacacatttgtgttggcaccagatgaattatttttcacaagagatggattacccattgctaaaacaagagggttacaaaatgttgttgatccattacctgtgtcagaagctgaatttttaacaagatataaagcactggttatctgtgcattcaatgagaaacaatcatttgatgctttagttgaaggaaacttagaactacataaaggaacgccatttgaaactaaagttattgaagcggcaacgttagatttactaacggcatttttagatgaacagtatcagaaacaagaacaagattatagtcaaaattatgcatatgtacgcaaagtaggacataccgttttcaaatgggttgctatcggtatgacaacgttaagtgttttattaattgcattcttagcctttttatatttttcagtaatgaagcataatgagcgcattgaaaaaggataccaagcatttgtaaaggatgattatacgcaagtactaaatacgtatgatgatttagatggtaaaaaattagataaagaggcactttacatttatgccaaaagttatatccaaacaaataaacaaggtttagaaaaagataagaaagaaaatttacttaataatgtgacaccaaattcaaacaaagactacttattatattggatggaattaggacaaggacatcttgatgaagcgattaatattgccacttatttagatgataacgatattacaaagttagcgttgattaataaattaaatgagattaaaaataacggagatttatcgaatgataaacgttctgaagaaacgaaaaagtataacgataaattgcaagatattttagacaaagaaaaacaagttaaagatgaaaaagcgaaatctgaagaagagaaagcaaaagcgaaagatgagaaattaaagcaacaagaagagaacgaaaagaaacaaaaagaacaagcacaaaaagataaagaaaaacgccaagaagctgaaagaaaaaaatagtataggactgaggcaaagacaatgcataaattgattataaaatataacaaacaattgaagatgctcaatttgcgagatggtaagacatatactattagcgaagacgagcgtgcagatattacgttgaaatcgttaggcgaagtcattcatttagaacaaaataatcaaggtacttggcaagcgaatcatacttctattaataaggtgcttgttagaaaaggtgaccttgatgacattacattacagctttatacagaagctgattatgcatcatttgcgtatccttcaattcaagatacgatgacaattggaccaaatgcgtatgatgatatggttattcaaagcttgatgaatgccatcattattaaagattttcaatcaatacaagaatcacaatacgtacgcattgtgcacgataaaaatacagatgtgtatattaactatgaactacaagagcaactaacgaacaaagcttacattggtgatcatatttatgttgaagggatatggctcgaagtacaagctgatggtttaaatgtattgagtcagaatacagtggcatcgtcattaattcgcttaacacaagagatgccacatgcacaggcagatgattacaatacgtaccatcgttcgccaaggattattcaccgtgaaccgacggatgatattaagattgaaagaccgccacagccaatacagaagaacaatacagtgatatggcgttccattataccgccattagtaatgattgctttaactgttgtcatctttttagtgagaccaattggtatttatattttaatgatgattggtatgagttcagtaacgatagtatttggtattacaacgtatttctctgaaaagaaaaagtataacaaagatgttgaaaaacgagagaaagattacaaagattatttggataataaatctaaagaaattaataaagcgattaaagcacaacgttttagtttgaattaccattatccaacggttgctgaaattaaagatatcgttgaaacgaaagcaccaagaatatatgaaaaaacatcgcatcatcacgatttcttacattataagttaggtattgcgaatgtagaaaagtcattcaaattagattaccaagaagaagaatttaaccaacgtcgtgatgaattattcgacgatgctaaagaattgtatgaattttacacagatgtagaacaagcaccattaatcaatgatttaaatcatggaccgattgcatatattggtgcacgacatctcattttagaagaattggaaaaaatgttaatccaattgtcaatattccatagttatcatgatttagagtttctatttgtgacacgtgaagatgaagttgaaacattgaaatgggcacgttggttgccacatatgacattgagaggtcaaaacattagaggatttgtttacaatcaacgaacacgtgaccaaattttaacgtcaatttacagcatgattaaagaacgtatccaagctgtgcgtgaacgcagtaaaagtaatgagcaaattatttttacaccgcaattagtgtttgtcattacagatatgtcattaattattgatcatgtcattttagaatatgtaaaccaagatttatcagaatatggtatttcattaatctttgttgaagatgtgattgaaagtttgccagagcatgtagataccattattgatatcaagtctcgtactgaaggagaactgattacgaaagaaaaagaattagttcaattgaaatttacacctgaaaatattgataacgtcgataaagaatatatcgcgcgacgtttggcgaatttgatacacgtcgaacatttgaaaaatgcaattcctgatagtattacatttttagagatgtataacgtgaaagaagtagatcagcttgatgtggttaatcgatggagacaaaacgaaacatacaaaacgatggcagtacctttaggtgtaagaggtaaagatgacattttatcattgaacttacatgaaaaagcacacggaccacatggtttagttgctggtaccactgggtcagggaaatctgagattatccaatcatacattttatctttagctattaattttcacccacatgaagttgcgttcctattgattgactataaaggtgggggtatggcgaacttatttaaagatttagtccatttagttggtacgattacaaacttagatggtgatgaagcgatgcgtgccttaacatcaatcaaagccgaattgagaaaacgtcaacgtttattcggagagcatgatgttaaccatattaatcaataccataagttatttaaagaaggtattgcgacagaaccaatgccacatttattcattatttccgatgagtttgccgaattaaaatcagaacaacctgattttatgaaagaacttgtatcaacggcacgtattggacgttcgttaggtattcatttaatacttgcgacacaaaaaccatcgggtgttgttgatgaccaaatttggtctaactctaaatttaaattggcattaaaagtacaagatagacaagacagtaatgaaattttaaaaacaccagatgcagcagacattacattaccaggtcgtgcgtatttacaagttggtaataatgaaatttatgaattgttccaatctgcatggagtggagcaacatatgacatcgaaggcgataaattagaagttgaagataagacgatttacatgattaatgattatggtcaacttcaagcaatcaacaaagacttgagtggacttgaagatgaagaaacgaaagaaaatcaaactgagttagaagcggttatcgatcatatagaatctattacaacacgattagaaattgaagaagttaagcgtccatggttaccaccattaccagaaaatgtatatcaagaagatttagtagaaacagatttcagaaaattatggtcagatgatgcaaaagaagtggaattaacattaggacttaaagacgtaccagaagaacaatatcaagggccgatggtattacaattgaaaaaagctggtcacatcgcgttaatcggaagtccaggatatggtagaacaacgttcttacacaacattattttcgatgttgcaagacaccatcgtcctgatcaagcacacatgtacttgttcgatttcggtaccaatggtttgatgccagtcacagacataccacatgtcgctgattactttacagtagatcaagaagacaagattgcgaaggcgatacgtatatttaatgatgaaatcgatcgccgtaagaagattttaagtcagtatcgtgttactagtatttctgaatatcgaaaattaactggtgaaacaattccgcatgtctttattcttattgataactttgacgcagtaaaagattcaccttttcaagaagtttttgaaaatatgatgattaaaatgacacgtgaagggctagcattagacatgcaagtaaccttaactgcctcaagagctaacgctatgaaaacaccaatgtacattaatatgaaaacgcgtatcgccatgtttttatatgataaatcagaagtgtcgaacgtagtaggacagcaaaaatttgcggttaaagatgtagtgggtcgagcattgttaagtagcgatgacaacgtatcattccatattggccaaccatttaaacatgatgagaccaaatcatataatgatcaaattaatgatgaagtatcggcgatgacagaattttataaaggtgaaacaccaagtgatattcctatgatgccagatgaaattaaatatgaagattacagagaatcattaagcttaccggatatagttgcaaatggtgctttaccaattggattagattatgaaggtgttacactacaaaaaattaaattaactgaaccagcaatgatttcatcagaaaatccgagagaaattgcgcatattgctgaaattatgatgaaagaaattgacatattaaatgaaaaatatgcgatttgtatcgcagattcaagtggagagtttaaagcttatagacatcaagtggctaactttgccgaagaaagagaagacattaaagcgattcatcaactaatgattgaagacttaaaacaaagagaaatggacggtccgtttgaaaaagattcactttacattatcaatgattttaaaacatttattgattgcacgtatattccggaagatgatgttaaaaaacttattacaaaaggaccagaacttggcttgaacattttatttgtcggcattcataaagaattaatagatgcttatgataaacagattgatgttgcacgtaaaatgattaaccaatttagtataggtattcgtatttcagaccaacaattctttaaatttagatttattcaacgagaacctgttattaaagaaaatgaagcatatatggtcgcaaaccaagcttatcaaaagattagatggtttaaatagcaatgaattaaataggagggaggtatgttatgaattttaatgatattgaaacaatggttaagtcgaaatttaaagatattaaaaagcatgctgaagagattgcgcatgaaattgaagttcgttctggatatttaagaaaagctgaacaatataagcgattagaatttaatttgagttttgcactagatgatattgaaagcacagcaaaggacgtacaaactgcaaaaactagtgctaataaggacagtgtaactgttaaaggaaaagcgcccaatacgttatatatcgaaaaaagaaatttgatgaaacaaaagcttgaaatgttgggtgaagatatcgataaaaataaagaatccctccaaaaagctaaggaaattgctggagaaaaggcaagtgaatattttaataaagcaatgaattaatattgaggtgaagatatgggtggatataaaggtattaaagcagatggtggcaaggttgatcaagcaaaacaattagcggcaaaaacagctaaagatattgaagcatgtcaaaagcaaacgcaacagctcgctgagtatatcgaaggtagtgattgggaaggacagttcgccaataaggtgaaagatgtgttactcattatggcaaagtttcaagaagaattagtacaaccgattgctgaccatcaaaaagcaattgataacttaagtcaaaatctagcgaaatacgatacattatcaattaagcaagggcttgatagggtgaacccatgatgaaagatgttaagcgaatagattatttttcttacgaagaattaacaattttaggtggtagtaaattacctctcgtaaattttgaattgtttgatccatcaaattttgaagaagctaaagcggctttaattgaaaaggaattagtaacagagaatgacaagttaactgatgcaggttttaaagtggctacattagtcagagagtatattagcgcaattgtaaatattcgaattaatgatatgtattttgcaccatttagctatgaaaaagatgaatatattttgttaagccggtttaaaaataatggatttcaaatacgaattataaataaagacattgcatggtggtcgattgtacaatcatatcctttattaatgagacaagaaaagtccaatgattgggactttaaacaaattgacgatgaaacattggagaacttaaataatgaaagtatcgatacgattgggcgtgttttagaaattgaaatatacaatcatcaaggtgaccctcaacaaagtttatataacatttatgaacaaaatgatttgctactcattcgatacccattaaaagataaagtactgaatgttcatattggcgtcattaatacatttatacgagaattatttggattcaatactgatgaaaatcatattaataaagcagaggagtaatgacgttgagtggaaaaattagtgttaaagctgaaacgattgcacatgttgtaaaagaattggaaagcattagtcaaaagtatgatgaaatagctcaaaactttggaaaaattgcgcaattaaattactacagtagtgaaaaagcttcacattctatggaaaacggctatagtagtgctgcaacagtcattagtggtctcaaaggtccattgagtacactcggtggtggtgtcatgaattcagcacaaaagttctttgaagcagatgaacattggggtacggaatttgccaagctttactataatattgagggataggtgcatgacatgacaaaagatattgaatatttaacagctgattatgacaatgaaaagtcatctatccaaagtgtaatagatgcaatagaggggcaagacttcttagatgtagatacaacaatggatgatgcggtaagcgatgtcagttctttagacgaagatggcgcaatatcattaacaagtagtgtagtaggtccacaaggatctaaattaatgggctattatcaaaatgagttatatgattatgcatctcaattagattcgaaaatgaaagaaattattgacacgccatttatagaagatatagataaagcattcaaaggtataacgaatgttaaattggaaaatatattaattaaaaatggcggtggtcatggtagagatacctatggggcttctgggaaaattgcaaagggagatgccaagaaaagtgacagcgatgtttatagcatcgatgaaatattaaaatcggatcaagaatttgtaaaagtaattgatcagcattacaaagaaatgaaaaaagaagataagaaattatctaagagtgattttgaaaaaatgatgactcagggcgcttcttgtgattacatgacagtagctgaagcggaagagctagaggagcaaaagaaaaaagaagaagctatagagattgcagcactagctggtatggtagttttatcttgtattaatcctgttgctggagcagtagctattggtgcttattccgcctattcagcagcaaatgcagccacaggaaaaaatattgtaactggaagaaagctatctaaagaagaacgaatcatggaaggactttcgcttattccattgccaggtatgggcttcctcaaaggtgctgggaaaagtttaatgaaattaggcttcaaaggcggagaaaaatttgcagttaaaacaggattgcaaaagacaatgcaacaagcggttagtcgtatttcacctaaaatgggaatgatgaaaaacagtgtgttgaatcaatctcgtaactttgctcaaaatactcatgttggacaaatgctgagtaacatgcgtggtcaagcaactcatactgttcaacaaagtagaaattggattggacaacaagcgcaaaatgtcaaacgaatagtgaataatggacttgataaagaaatagcacatccatttaaacaacaacttgcaccagcgggaatgggtggtataaaatttgctgaaacaactactttgagaaacatgggtcaaaacatgaaacgtgctgttacaccacaaaatcacgtgacacatggtccgaaagatagtatggtgagaagtgaaggtaaacatagtgtaagtagccatgaaataaattcatcaaaatatgttgaatcaccaaactacaccaaggttgaattcggagaacactatgcaagacttagacctaagaaactaaaagcaaatatagaatatacaacaccaactggtcacatatatcggaccgatcataaagggcgcataaaagaagtttatgtagacaatctttctctaaaagatggcggtcgtaataaccatgcacaaagaactgtggggggagaggatagattaccagacgatgatggaggtcatttaatcgctagaatgtttggtgggtcaaaagacatagataaccttgtggcacaaagtaaatttatcaaccgttcatttaaggaaaatggacaatggtataagttggaaaaactatgggaaaaagcaatcaagtctgggaagtcaatagaaaatgttaaagttgaagttaaatataaaggtaatagtcaaaggccaaccgaattttcagttagatataatattaatggtgagcagtttttaaaaaatataattaataaataggaggattaacatgactttcgaagaaaaactaagtcaaatgtataacgagattgcgaataagattagcagtatgataccggtagaatgggaaaaggtatatgcaatggcatatatagatgatgaaggaggcgaagtgttctactattacacagaacctggaagtaatgaattatactattatactagtgtattaaataaatatgatatatcggaatcagaatttatggattcagcgtatgagttgtataaacaatttcaaaagttaagaaatatatttaaaaaagaaggacatgaaccatggacatcatgcgaatttgattttacaaatgaaggtaaattaaaagtttcatttgattatattgattggataaatacagagtttgatcaattgggccgtcaaaattattatatgtacaaaaaatttggggttataccagaaatggaatatgaaatggaggaggttaaacaaatcgagcaatatattaaagagcaagaagaagaatagacaatcttaatttgagactaaacaataaagctttgtttagtcttttttggcggttaagtaaaaagcaatagagaccgtaaagttgatgctcatcaaataataatataaagataattttaggtttttaaacttttaatcgaaaagaatctaagtatatatagctttaaatacgtaatatgctatttaaaagataatgtataggagatagatatgactactaaagaaaatattgatactcttcgaaagccaggtgcacaagccttaagtttaatatcattgtttttgatacttttttcatgtctaactttcttttttggtttagattatgaaaggtttccaaactatttaaagataacgacaattatagaattaataattattgtaattagtttacttcaatggattagatttatagacttcgaaaaagaaagtacacagaaatataaaaaaatatatgctcgatttttagttattataaatgtgttaactactatcactgtagtatttgcactgtgtaacctttattattttgcagctgtacaaaaccattacgatttattcaattattggttaatgggtacgatttcaatcataattagctatttattattagtaattggcggaatgtttacgttgttaaaattacctaaagtaacaaaacgctgggggggtaaaactaaaacacatttcggtttattattaactgcgttgagctcatttatatatattgaaaaaattatcgaatatatattgattcctaatgtcgtagaatccaagtttataattattgtgagcatgatggttatcgccggagcacaatttgtggcatttcaatttattatgcaatacagtagattctatatttttgaattaaacactgaagatgatgactaaatgaatttataaattactgttaaagtatacttaaataagaaaatcaacttcaacgtatatcgccatattattttatactcaatgatgtgaatggatttaagtggattgatattaaagtaaaagttatggaatattgaggtgcgaatatggagttcttattattaattgtcgtagccggactgtattatattatatatttaactgctgtgatgtattctgaaaaaatagtagtattgcctataatcatctatgccattgtgtttgtagtaattggtatcacttatatttttataggtgacagctatgatcagttaacaaatttcaatgtgattttgtatatggggagtttgttttatgcatggatggcttttagaaatctttggaacagaccattattattaaaatataagaacattacagatagttcaagtggaatagttaataaatctgaatataattcagttgaaagcttacgtataaacattgaaatagctaagtataaagggattatttctttgatagtagctatagtactaacggtattaatgacattaaagtcaacgcctcaaattactgcggaaacacgtgacttaagtatctcatttttcatactcagcttatttatcattattatatttgctgtttgggatttaattattagagttagaaaaggagcgtttgcttttgttgtaataaggccaatattattcagttgttggttatttattctgaatatgattttatcaagattagtataatgataagaagttgaataaattgtaatgtgaaaaatcattgagaatttctattattgtaacaatagtttcagttattttagtttcattagtttatttaggtttaaaatgagtaatattattttgaagaagcattaagccacgtagaggtgttgtttaatgctttttatttaacggtaatgaaaatataggggagataacatgactttcgaagaaaaactaaatgaaatgtacaacgagattgcgaataagattagcagcatgataccggtagagtgggcaaaggtatatgcaatggcatatatcgatgaagaatctggagaagtgtttttcaattatactgaaccaagaagtgatgaattattttactatacaagcgtgataaaaaagtataatatttcgagatcaggatttatgaattcagtatatgagttgcatgatcaatttgaaaaactaagagaattgtttatagaagaaggacatgaaccatggacatcatgtgagtttgattttacaaaagaaggtaaattgaaagtatcttttgattatatagattggttaaatacagaatttgatcaattgggtcgtgaaaattattatatgtacaaaaaatttggggttataccagaaatggaatatgaaatggaagaaattaaagaaatcgagcaatatattaaagagcaagatgaagctgaacaatagaggcgataacatgactttcgaagaaaaacaaagtgaaatgtacaataaaattgcaaatgagattagtggaatgataccggttgagtgggaaaaggtatatacaattgcttatgtagataatcaaggtggagaggtcatttttaattatactaaacctggaagtgaagaattgaattattattcagatattcctaaagattgcaatgtctcaaatgatatttttatggatttatggatgaaagtttatcgaatgtttgatgagttaagagaaacttttaaaaaagaaggacatgaaccatggacatcatgtgaatttgattttacaagagatggtaaattgaaagtatcttttgattatatagattggttaaatacagaatttgatcaattgagtcttgaaaattattatatgtacaaaaaattcgaggttataccagaaatggaatataaaatggaagaaattaaagaaatcgaacaatatattaaagagcaagaagaagctgaaatataggggagatgacatgactttcgaagaaaaactaaatgaaatgtacaacgagatttcgaataaaattagtagcatgataccagtagaatgggaaaaggtatatacaatggcttatatagatgatggaggaggtgaagtattctttaattatactaaaccaaacagcgatgaattgaattattacaccgatatacctaaggagtataacatttctgtgcaagtatttgatgatttatggatggatttatatgatttgtttgaggaattaagaaatttatttaaagaagaaggactagaaccatggacatcatgcgaatttgattttacaagagaaggtacattgaatgtatcttttgattatattgattgggttaatacggagtttgatcaattaggccgtgaaaattattatatgtacaaaaaatttggggttataccagaaatggaatatgaaatgaaagaaattaaagaaatcgaacaatatattaaagagcaagatgaagctgaaatataggggagataacatggctttcgaagaaaaactaaatgaaatgtacaatgagattgcgaataaaattagcagtatgataccggtagaatgggaaacggtatatgcaatggcttatgtaaatgaaagaagtggagaagtgttttacaattatactgaaccaagcagtgatgaattattttactatacgagcgtgttaaataaatataatataccaagatcagaatttatggactcagtatatgaattatataagcaatttgataatttaagagaattgtttatagaagaaggactcgaaccatggacatcatgtgaatttgactttacaagagatggcaaattgaatgtatcttttgattatattgattgggtgaattcagaatttggaccaatgggaagagaacattattatatgtataaaaaatttggaatttggcctgaaaaagaatatgccataaattgggttaaaaaaataaaagattatgttaaagagcaagatgaagctgaactataggggagataatatgactttcgaagaaaaactaagtcaaatgtacaacgagattgcgaataagattagcagtatgataccggtagagtgggaaaaagtatatacaattgcttatgtagatgatcaaggtggagaggtcatttttaattatacaaaacctgaaagtgaagatttgaattattacacggatatatctagagattataatatttcagaagaaatatttgatgatttatggatgaatctttattacttgtttatgaatttgagggatttatttaaaaaagaaggtcttgaaccatggacatcatgtgaatttgattttacaagagagggtaatttgaaagtatcgtttgattatatagattggattaaattaggttttggtccatcaggaaaggaaaactactatatgtataaaaagtttggtgttataccagaaacggaatatgaaattaataaagttaaagaaatcgagcaatttattaaagagcaagatgaagctgaactataggggagataatatgactttcgaagaaaaactaagtcaaatgtacaacgagattgcgaataagattagcagtatgataccggtagagtgggaaaaagtatatacaattgcttatgtagatgatcaaggtggagaggtcgtttttaattatactaaaccaggtagcgaggacttgaattattacacatatatccctagagagtataatgtctctgaaaaagtattttatgatttgtggacggatttatatagattgtttaagaagttaagaaacgcatttaaagaagaagatttagaaccatggacatcatgtgaatttgactttacaagagatggtaaattgaatgttgtatttgattatgttgattggatgaattcagaatttggtccatcaggaaaggaaaactactatatgtataaaaagtttggtgttttaccagaaacggaatatgaaattaataaagttaaagaaatcgagcaatatattaaagagcaagatgaagctgaactataggggcgataacatgactttcgaagaaaagctaagtcaaatgtacaatgaaattgcagatgaaatcagtggaatgataccagtagaatgggaaaatatatatacaattgcctatgtaactgatcaaggtggagaggtcatttttaattatactaaaccaggtagcgatgaattgaattattacacggatatatctagagattataatatttcagaagaaatatttgatgatttatggatgaatctttattacttgtttatgaatttgagggatttatttaaaaaagaaggtcttgaaccatggacatcatgtgaatttgattttacaagcgaaggtaaattaaaagtttcatttgattatattgattggataaatacagagtttgatcaattaggccgtgaaaactattatatgtataaaaagtttggtgttttaccagaaatggaatacgaaattaataaagttaaagaaatcgagcaatatattaaagagcaagatgaagctgaactataggggcgataacatgactttcgaagaaaaattaagtcaaatgtacaacgagattgcgaatgagattagtgggatgataccagtagagtgggaaaaagtatatacaattgcttatgtagatgatgaaggtggagaagtcgtttttaattatactaaaccaggtagtgatgaattgaattattacacatatatccctagagagtataatgtctctgaaaaagtattttatgatttgtggacggatttatatagattgtttaagaagttaagaaacgcatttaaagaagaagatttagaaccatggacatcatgtgaatttgattttacaagagagggtaatttgaaagtatcgtttgattatatagattggattaaattaggttttggtccatcaggaaaggaaaactactatatgtataaaaagtttggtgttttaccagaaacggaatatgaaatggaagaaattcgagaagtagagaagtatgttaaagaccaagagtagcatatatgttatagaaggctgtgcaaaatcaccctagttttacatttgactcaaagaagaaggtaaacgataagattatttgcaacttaaaaagtctattagcttctcggtatccatacatcatatgtataaatgagtttaactaattaataaatcacgatataaatttaaaattgccattaattgaaaaggttattgtagtgtattttataaagttgatgcacatcgacttattttttaaaacttatatcaaaaaaatatgagaaaagtatatactattaaaatgttttttactataattataaatagttaaatatttgggaattaaataaatatataggaggcaatttttagagatacatagcaatataaaggtatcaaatagttattgcataatttattatgatgacataattttcagtagatagttgtaaattaacactgaaatagatgtttatattaagaagactttaatatcataattaatcaaaatcttgcgtcaaacatttaaacgaattttaagttgataacaattggcaaaacattgttcaaacatcacaatgataaagcatattatcagtattgtagtgtgtggaaaatgacagccatctaaggagaaaaatgatgaaaagaatattggtagtatttttaatgttagcaattatattggcaggttgttctaataaaggtgaaaagtatcaaaaagatattgataaagtgtacaaagaacagaatcaaatgaataaaattgcctcgaaagtacaaaacactattaaaacagacattaaacaagaagacagtaatacacatgtttataaagatggtaaagtcattgttattggtattcaattatataaagatcgtgaaaaaatgtattatttcgcatatgaaataaaagatggtaaggcagagattaatagagaaatagacccaattaagtatatgaaagaccataaagcagattatgaagatgaaaatgtagaagtggaaaaagattaacataggctttctttaaaacttttaacctgtttcaaaaagtaaatgagctttagcgacaataatttttaaaataaacacgatataaatttaaacatttatatataagaacacaaacgtaagtttgtaaataataataaaggagtaagtcaatggaaaaatcgatcaaaataatgacaataataggaattgttattcagggtttagcaacggtatttagtttactattgatggttttagcagcatcaggtgtaatgactacagatgtgtcaacaacagttaatggtgaggttgacccagttgatgcagaaacagcagcagcaattttcactgtattattcttattcctattcatatttggaatcatttcaattattttaggtgcaatcggtatgtttaaagcatctaaaaacaaaaaaatgagtggtatattgttgattattggagctgtaataagtggtaacataattacatttgctttatggttagtcagtggtattaaactacttactaataacaagcctaaagatgaaataagcgacttatcataaacatcgtatattgaaatttcaagatttcttaagtaattatatttctgttagtttttaataaattaaccgattaaataaagtgctctcttagaagtagattttcagtcaataactgcttttaagagagcattttgtatttgataatgctcatagcatcggacaaaaaccattgacgaactttaaaaaaatacgttagacaatgcacttctaaatattaaaggcatcgactaacgcattgttcaaatagagttaattatttttataaaattgatgatgatcattcaagtaagcatagaataaacctataatgagtcctcctccaatatagttaccgataaaagccgcagcgatattcgaaatagctggtatgaagtgcaatgtatcaacttgataaattaaaccacccataaataagcaactgttgtaaacgacgtgttcataacccataaaggcgaatatggtaacaccgaacatcatgacaaacatttttgcgagtacatcgtcaatttgcatggcaataactaatgaaatattgataaagaaattggcgaatatcgctttcattaatatacttacaaaaccagtagacaacgttttgtgctcaataactgctgataactgatttaacatatctggcgtcattacatttgaaaaacgcatgaaactaaataaaatggcagcacctaaaatatttcctgcaaagcacaataaaaatattttcaatactctagtcggtttaattactttataatacaggcctacagtaaagtacatgaagttactggttagtagttcggagtttgtaaataaaatgagtactaacgcaaagctgaatgtaatggcactggccatattcacaatgcctggcggtaaatctggttcgtgtgttgctttaactgataatacgaagaccgtaataatcccgataataaatcctgccatcatcgcgcgtaataaataacgttttaaataaacgctttgtaatatatcttttgttcttattgtttcgactacgttatttacccagtcgtccccataaaatattttatcccatttaatatgtttctccttcacaatgacatcctcacttttcatttgttaatcagagtatactatgaatcgtcttatttgtgaataatttcacaaaattaattttaaaaactaatatttttgaataacagctaggattttttaacaaatcatttattttaaaataattaatcgtcagttagtatcaatgaataaatacagattttcatacaaaaaaacctagtaatgatgcgacgatcattactaggagattatgcgtctattaagttgtagcttgtttcggacggcgtataaatacatcgattatgaaaccgataatagcaaagagcatgaatggtacaagccaagctaaatcgatatctgctaaaggtaacatcataaacgatttcaaaataacaccgtgtaataagttaaaactatttagtatttgtaaaattgaaataatcaatgtaataacagttgcgagtcgataggcccaactgaatctgaatgtgctaaacatgttagcaaatgatatcagtacaagtgcaatagacacgggatatattaatgtcaataatgggacagcaatttttaaaatcatttctaaaccaagtgttgtaaataagaaccctatgatagagaaaataagtgcgaatattttataagaaaacttaggtacgtgtttcttagtaaatgtggcgcaagcattgacgagtcctatacatgttgttaggcatgcaaggataaccgtcattccaaatacgaggttaccgaacgaaccaaatactcgtaatgagttgtacgtcaatatatctgtaccatctttaaagtttcctggagctgttgatgccccaacgtatgcaagtgcaaagtaaatcattccaagtaatatggctgcaataagacctgaaaagcagacatattttaaaattttcatgcgatctgtgaggcctttaaacttatagccattgacaatgacaacggaaaaagctaacgcagcaacaagatccattgtaaaatagccttccaaacttcctgaaatgaaaggatgtgttatatatttatccttaggtgcacttagtgcagattcagggttgaaaatgacagcaatacttaatagagagaccattaatagtaataacggtgttaataatttacctaaattatcaacgattttcgatggatttaaactaatccagtaaacgatggcaaaaaagattgctgcgaatataattaaagtccattggttgtgcacaggtaaaatgtgtcttgtaccaatttcgtacgcgacatttgcagcacgtggaataccgtaaaatgctccgatagacatgtaaatcacgacagcaaaaataaacccgaaccatggatgtatacgattgcctacactttcaacaccttcatcataaaatgcaacaacaataacagtaataaaggggagtaatatgcctgtaagagcaaagcctagcataccaatccacatattttgacccgctgtatggccaagcatgggcgggaatattaaatttccggctccaaaaaatagtgaaaataacatgaggcccgaaataataacttgttttttcaatgtaatttccttcctaaaactagatattcataataatttaaaaaatctgaaaaataaaaacgttcttactttatctttaaatgacaatactatgattctattattttataaaaaagattgcaataataacgtcttgctattattggataatgacaattaaagtgtcgtttttatgaattaaaataagtgaaaataagttggaaatacgttggagcgttgtgatttttatgagaaattgtatgagtgaggactgctatttataaaaggtaaactatggatgagtttatagttgttccaataggtaaataagagatagcacactgtacacataatgatacgtggatgagtgaatatgtctgataggaaggcctagtcactcaaatgaatttaagtttattacgtgataaatcacaaatctctctcatgtgataggtctcccattaaatcatgcttatatgaaatgttcacatatttgttagcttttcaagaaataatattaaatatcttttcatagtatagcaatattaaataaatgcatttataattttaactgtattttaaatattaatcatgaggtgataagatgaataaaatttcaaagtatattgcaatagcatcattatcggtagcggttacagtttcagcaccacaaacgacaaattctacagcgtttgccaaaagttctgctgaagttcaacaaacgcaacaagcttctataccagcatcacaaaaggtgaatcttggtaatcaaaatattatggcagtggcttggtatcaaaattcagctgaagcaaaagcattatatttacaaggttataacagtgcgaaagttcaactagataaagagattaaaaagaataaaggtaaacataagttagctattgctttggatttagatgaaacagttttagataattctccatatcaaggctatgcatcaatacataataaacctttcccagaaggttggcatgaatgggtacaagctgctaaagctaaacctgtctatggcgcaaaagaattcttgaaatatgctgacaaaaaagatgtcgatatctactatatttctgatagagataaagaaaaagatttaaaggcaacacaaaagaacttaaaacaacaaggtatccctcaagctaagaagagtcatattttactaaaaggtaaagatgataagagtaaagaatcacgcagacaaatggttcaaaaggatcataaacttgtcatgctatttggagataatttattagactttacagatccaaaagaagctacagctgaatctcgtgaagcattaattgaaaaacataaagacgatttcggtaagaaatatatcattttccctaacccaatgtatggtagttgggaagctacaatttacaacaataactataaagcaagtgacaaagcaaaagataaattacgtaaaaatgctattaagcaattcgatcctaaaacaggcgaagttaaataatatatgaattggacgtctacatgtacttaaaggtatatgtaggcgtttttaaattgatccttaaattttaaatgtaccgtacaaaaataatagacaattaattgcattttccataaatttgcttttaatataaaaagttcgggtataatgaaggataagtgtatgtataacattacagagcgcaacacgacgtacgtgcatctaagaatataaacaatgtttaaatcatagtagtagggagagaaatgcatgtttttagcttggaatgaaatacggcgcaacaaattgaagtttggactaattattggtgtgttaacgatgattagttacttgctatttttattatctggattggcgaatggtcttatcaatatgaataaagaaggtattgataagtggcaagcagaggccattgttctaaataaagatgccaatcaaactgtgcaacaatctgtttttaacaagaaagatattgaaaataaatacaagaagcaagctactttgaagcaaacaggggaaattgtgtctaatggccatcaaaaagacaatgttttagtgttcggtgttgaaaagtcatcatttttagttccgagtttaatagaagggcataaagcgactaaagataatgaagtgttagctgatgaaacacttaaaaataaaggatttaaaattggcgacacattatcactatctcaatcagatgaaaaattgcatatcgtaggttttacagaaagtgcaaaatataatgcgtcaccagtcattttcacgaatgacgctaccattgccaagatcaatcctagattgactggagataaaattaatgcagttgttgtacgtgatacaaattggaaagacaaaaaattaaaccaagagcttgaagcggtaagtattaatgactttattgaaaatttaccaggttataaaccacagaacttaacattaaactttatgatttcattcttatttgtcatttcagctacagttataggcattttcttatatgtcatgacattacaaaaaacaagtttatttggcatattaaaggctcaaggatttacgaatggctatttagcgaacgtagttatttcgcagacgctcatattagcattatttggtacggcatttggcttactgttaacaggcgttacaggtgcatttttacctgatgcagtacctgtcaaattcgatgtactaacattactcgtatttgcaattgtgttaatgattgtctctgtattaggaagtttattctccattttaacaattagaaaaatagatccgttaaaggcgattgggtaggaggtgtagcaaatgttgaaatttgaaaatgtaacaaagtcatttaaagatgggaatcgtaacattgaagcggttaaagatacaaattttgagataaataaaggtgatattatagcattggttggaccttctggctctggtaaaagtacatttctaactatggcaggtgctttacaaacgccgacatctgggcacattttaatcaataaccaagatattacgacaatgaagcaaaaagcattggcaaaagttagaatgtctgaaataggttttattttacaagctacaaaccttgtgccatttttaacggtaaagcaacaatttacattattgaaaaagaaaaataagaatgttatgtctaatgaagactatcagcaacttatgtcacaattagggctaacttcattgcttaataagttaccttcagaaatttcaggtggtcagaaacaacgtgtggcgatagctaaagcgttatatacgaatccgtcgattattttagcggatgaacctaccgcggcgttagatactgaaaatgcgattgaagtcattaaaattctacgtgatcaagccaaacaaagaaagaaagcatgtattattgttacacatgatgaacgacttaaagcatattgtgatcgttcatatcatatgaaagatggcgtccttaatcttgaaaatgaaacagtagaatagttttattaagccggtacatcatgtgccggtatttttatgtttatgtattatttgaataaactttcacattcaattaataataattattatcgaaaattagaaatattccgtgaaatataatattttttgtagtaaaatggcctctaagtattcaatatttaaatatggggattgaatataaaattatcgtaatgggggtcaatggttatggatttattgataggtactttatttttatttttggtcttagtgatttttacattatttacatataaagcacctaatggtatgcgtgccatgggagcattagctaatgcagcaatcgcaacatttttagtagaagcatttaataaatatgttggtggcgaagtattcggtattaaatttttagaagagctaggagacgctgcgggaggtctaggtggtgtcgctgccgctggattaacagcattagctatcggtgtgtcaccagtatatgcattagttatagcagccgcgtgcggtggtatggatttattaccaggtttctttgcgggttatatgattggatatgtgatgaaatatacagagaaatatgtgccggatggtgtcgacttaattggatcgattgtcatcttagcgccattagctcgtcttattgcagtattattaacgccagtagtgaatagtacattgattcgaataggtgatattatccaaagtagtacgaatacgaatccaattatcatgggtatcattttaggtggtattatcacggttgtcggtacagcgccattgagttcaatggcattgacagcattattaggtttaacgggtgtacctatggctattggtgccatggcagcatttagttcggcatttatgaatgggacgctattccatcgcttaaaattaggtgatcgtaagtctacgattgcagtaagtattgaacctttatcacaagcagatattgtatcagccaatccaattccaatctatattacaaatttctttggtggtgcgattgctggtttaattattgctatgtcaggtttaattaacgatgcgacaggtacagctacaccgattgcaggatttttagttatgtttggatttaatcatccgacgacaattgtgatttatggtgtagtaatggcgattgtaggtgcgcttgcaggttatcttggttcaattgtatttaaaaaatatccaattgttactaagcaagacatgattaatcgaggtgcagtagacgcatagcatcatcatattgaatagtaaaaacaaataaaacatagtaacgtgattcagtcgatgtaacagtcgataatgagtcacgtttttttatagaaaaatataagacataaaaatgtcataatttattgtcgacaaatatcatactgtataaacatttatcattttctcaagtaccttttacacgatggaatgaacttactttttacgaaattatgcgtattttataaacaaatatcattgatataacggtaaatgtaagcgtttacaacagaaataacagcatgctacgatatttttgtgaattcactgattcaagtattttaagtcaatatgaggagggatgttatgagcgattctgagaaagaaattttaaaaagaattaaagataatccgtttatttcacaacgtgaacttgctgaggcaattggattatctagacccagcgtagcaaacattatttcaggattaatacaaaaggaatatgttatgggaaaggcatatgttttaaatgaagattatcctattgtttgtattggcgcagcgaatgtagatcgtaagttttatgtgcataaaaatttagttgcagaaacatcaaatcctgtaacgtcaacacgctctattggtggcgtagcaagaaatattgctgagaacttaggtaggcttggcgaaacggtcgcttttttatctgctagtggacaagatagtgaatgggaaatgattaaacgattgtccacaccatttatgaatttggatcatgttcaacaatttgaaaatgcgagtacaggttcatatacagctttaattagtaaagaaggcgacatgacatatggcttagcagatatggaagtgtttgactacattacgcctgaatttttaattaagcgttcacacttattgaaaaaggctaagtgcattattgtcgatttgaatttaggcaaagaggcattaaacttcttatgtgcctataccacgaaacatcaaatcaaattagttatcaccacggtttcttctccaaaaatgaaaaatatgcctgattcattacatgctattgattggattatcacgaataaagatgaaacagaaacatacttaaatttaaaaatagaatctactgatgatttaaaaatagctgctaaacgctggaatgatttaggtgttaaaaatgttattgtgacaaatggcgtgaaagaactcatttatcgaagtggtgaggaagaaatcattaagtcagttatgccatcaaatagtgtgaaagatgttacaggtgcaggcgattcattctgtgctgcagtagtgtatagctggttaaatgggatgtctactgaagatatattaattgctggtatggttaacgcaaagaaaacgatagaaacgaaatatacagttaggcaaaacctagatcaacagcaactttatcacgatatggaggattataaaaatggcaaatttacaaaagtatattgagtattctcgagaagttcagcaagcactggagaacaatcaaccgattgtagcattagaatcaacaattatatcgcatggtatgccgtacccacaaaatgttgaaatggcaacaacagtagagcaaattatcaggaataatggtgccattccagcaaccatagccattatagatggcaaaattaaaattggtttagaaagcgaagatttagaaatactggcaactagtaaagacgttgctaaagtatctagaagggatttagcagaagttgttgcgatgaagtgtgttggtgctactactgtagcgacgacgatgatatgtgctgcaatggctggtattcaattttttgttacaggaggtattgggggcgtccataaaggtgcagaacatacgatggacatttcagcagacttagaagaactgtctaaaacaaatgtcactgttatctgtgcaggtgccaaatcaattttagacttacctaagacgatggagtatttagaaacaaaaggcgttccagttattggatatcaaacgaatgaattgccagcattcttcactcgcgaaagcggtgttaagttaacaagttcggttgaaacgccagaacgacttgctgacattcatttaacaaaacagcagttaaatcttgaaggtggcattgttgttgctaatccaattccatatgagcatgccttatcaaaagcatatattgaggcaatcataaatgaagctgttgttgaagcggaaaatcaaggtattaaaggtaaggacgccacaccgttcttgttagggaaaattgtagaaaaaacgaatggtaaaagtttagcagcaaatataaaacttgttgaaaacaatgcggcgttgggtgctaaaattgctgtcgctgttaataaattattgtaggtgatgatacatgaatattttattcgctatcacagggatagcatttgcactatttgttgcgtttttattcagttttgatcgtaaaaacatagacttcaaaaagacgttaataatgatatttattcaagtgttgattgtgttatttatgatgaacacaacgattggtttaacaatcttaactgcattaggctcattttttgaagggttaataaatgttagtaaagcaggtataaactttgtttttggagatatacaaaataaaaatggctttacgttctttttaaatgtgttgctgccattagtgttcatttctgtattaataggcatttttaattatattaaggtattaccatttattatcaaatatgtaggtatcgctattaataaaataacgagaatggggcgcttagaaagttactttgctatttcaacagcaatgtttggacaaccagaagtatatttaacaataaaagatattattccgagattatctagagcgaaattatatacaattgcgacgtctggtatgagtgctgttagtatggcaatgttgggttcatatatgcagatgattgagcccaagttcgtagttacagctgtaatgttaaatatttttagtgcgcttatcatcgccagtgtaatcaatccctataaatctgatgatagtgatgttgaaattgataacttaactaaatcaacggaaacgaaatcagtgaatggaaaaacaggaaaacctaagaaagttgcctttttccaaatgattggtgatagtgcgatggatgggtttaaaatcgctgttgtagtagccgtaatgttgttagcatttatttcattaatggaagcaattaatatcatgtttggtagtgttggtttgaactttaaacagcttattggctatgtgtttgcaccaatcgcattcttaatggggattccatggagcgaagctgttccagctggctctttaatggcgactaaattaattacaaatgagtttgtagcaatgcttgattttaaaaatgtcctgggtgatgtatcagctcgaacacaaggtatcatttcagtttacttagtaagcttcgctaattttggtacggttggtatcatcgtaggttcaattaaaggcattagtgataaacaaggagaaaaagttgcatcctttgcaatgaggttgctacttggttcaactctagcttctatcatttcaggatcaatcattggcctagtattataatttaatcgaagtacctaaattaaattcataacaacatcaaaaccccgtcaccaagttggcgcaacagcgcatcataacttagtgacggggttttatcataacaatctactttttcgtagccatttttgaaatgtatgttgatggtttatctttttcaaaaattgttaatcccgttatatcttttttatgttttgaagggacaatgaagctaagtatataagcaaagacaaaagcaactgtaaatgaaatggtagatacatagaaaggtgagttacctttgccaacaccattatagacataagcaaagatgatacccaatattaatccacaaataacaccgaatgtattcgtacgtttagtgaaaataccaactgcaaatacaccagccaatggaacgccgaataatccagtcacaaacaagaataaatcccataagtcatttgaattagaagcaattaagtatagtgacattccaaaaccgaaaatacctgcaatgatgataatgaaacgtgcaaagttaacttcgtgtcgctcgctaccttttccgaagaagcgttgcttaatgtcgattgaaatacaagcagatatagaatttaaactagatgaaatggtagactgtgcagcggcgaaaatggctgcaataagtaatcctgctacaaatggtggcatctcagtcaaaatgaaatatggcactacagatgatgtattgaagccttttggtaaaacagcttcatgtgtataaaatgaatacagcattgtacccataccataaaataagggggctgaaattaaagctaggataccatttgtccataacgatttatttgtttcttttaaactatcagaagcttgataacgctgcacgacgtcttgactcgctgtgtattgatacaagttgttgaaaatatttcctaggaaaataattggaatggcagctgccgcagtatttagtttccaattgtctgcactaattaattttttgtgctcaatcgcatctgcaaagacagtgccaaaaccgcctttaatgttcataacacctagaataatgataactaaagcgccgcctaataaaatgacgccttgaatgaaatcactccaaaccacaccttcgaatccacctaaaaatgtatataaaatacatagtaaaccaacgagtgatgcaacgatataagggttcatgtctgatacagatgtgattgctaatgttggtaagtagataacgattgcaacacgccctaaatggtaaacgacaaataataatgagccaataacacgtatgctagggccaaatctagcttctaaatattcatatgctgatgttacttttaactttttaaagaaagggacatagaaataaatgagtaatggaataattgcgacgatagcaatgttaccagcgatatatgaccaatctgttaaaaatgctttctctggtgtcgacataaatgtaatcgcacttaacgtagtagcataaattgaaaagccaactacccaagatggcaagcgaccacttgcggtaaagaaactattggtactttggctcgcgcgcttggtaaaataaacgccaatgaacaacatagctagtagataaatgataacggcaacccagtttagtgtgccaaatccaatttctttcatgggcaacatcccctttacaatgtattgattctttgatgtctataaatcgtattttgcaatgagttgatctaatgtttgtcgatgtgcttcgttaaaaggtttgaaaggtcttttcggtaatcctgcatcaatgccacgatgacgtaatatttctttcaatgttggataaatccccattgataacactgtttcgataatgtcgtttgaatcatgttgtagttggtaagcttcttgaatttgaccttgtcttgctaagtcgaagatttttctagcgcggcgaccattaacgttatatgtagaaccaattgcaccatctacgccagaaatcgtagcttgaactaacatttcatcaaagccagataagattaatttgtctgggaatgcttttctaatacgttcgagtaggaagaagtttggcgctgtatatttaacaccaacaattttttcatgattaaatagctcgctgaattgttcaatagaaatattcacacctgttaaatctggtattgcataaataatcatattgttctgagttgcttcgataatatcgaaatagtaatctctaatttcttcaaaagtaaatggatagtagaatggtgttacggcagaaagtgcatcataaccgagttctgtggcatattttccaagttcaatggcttcatttaaatctaacgaacctacttgagcaatcaatttcactttatccccaactgcctctttggcaactttgaaaacttgcttcttctgctctgtatttaataaaaagttttcgcctgagctaccatttacataaagaccgtctaattcttcagtttcaatggcattttgagcaatttgtttgagtccttgttcatttacttgaccattttcatcaaaaggaacgagtaacgctgcatataaaccttttaaatctttgttcattatgaagtccctccaaaaatcatttgataatatagtttacagctataattgtaaacgctatcataaaatgtaacaatatctttttgaaaattgtagtcatatttatgtataattaatgaaaatgtttttcaaaatcaatagaaatggagtgagtaaggtgtattacatcgcaatcgatattggaggcactcaaattaaatcggcagttattgataagcaattgaatatgtttgactatcaacaaatatcaacgccggacaacaaaagtgagcttattactgacaaagtatatgagattgtaacaggatatatgaagcaatatcagttgatccaacctgtcataggtatttcatcagcaggcgttgttgatgaacaaaaaggcgaaattgtatacgcagggccaaccattccgaattataaaggtactaattttaagcgattattaaaatcactgtctccttatgtcaaagtaaaaaatgatgtaaacgctgcattactaggcgaattgaaattacatcaatatcaagcagaacggatcttttgtatgacgcttggtacaggcattgggggtgcgtacaagaataatcaaggtcatattgataatggtgagcttcataaggcaaatgaagttgggtatttattgtatcgtccaactgaaaatacaacgtttgagcaacgtgctgcaacgagtgcattgaaaaagcgcatgattgccggaggatttacgagaagcacacatgtgccagtattgtttgaagcagctgaagaaggtgatgatattgcaaaacaaatattgaatgagtgggcagaagatgtagcagaagggattgcccaaatacaggtcatgtatgatccagggcttatattaattgggggcggtatatctgaacaaggagataatctcattaaatatatcgagccgaaagttgcacactatttaccaaaagactatgtttatgcaccaatacaaacgactaagagtaaaaatgatgcagcattatatggctgtttgcaatgatagttgaaagaaggagtcattctaaaatagaatttgaaaccgttacgagagatgagagctgttgttagttccacacatcacactctatctaggaccaatctaaactatatcaaccaacagtgtgccacagacatattaaattgaagaagctgagatattaaaattttagaaaatgaaaaaaatatttggtattgaaattaaaaaagcacctagcaactcgttgggacaatcacgatgattgtctacagttgcaggtggatttgaatatactactagttatttgttgtctaggataatagatttagtatgttgataagtttgactcagattcgtattttctaataaatgatagctcacgatatcgattaaaaagagtgtcgcaatttgtgtgttgataaattgatggtcggtattacgcgattgatccgttgttaaaagtactaaatctgcacaatctgtaagtttgctaccttcgaaatttgtgatggcaacgacatatgcaccatgagatttggcgacttccgctgcagaaattaattccgaagtattaccactatttgacatagcaataaacatatccgaatgagatagtagggatgccgatattttcattaaatgtgaatcggtagtaacattaccttttagccccatacgaatcatacgataataaaattcagtcgctgataaaccagagctacctagtccagcaaagagtatatgtcgacttgattgaagtttgtcgataaaggtttggataatgtcgttatcaataaattcaccagtttgttgaatgatttgttgatgatatttatgaattctttgaataattgggctattttcaataactgtctctgtcatttcttgttgaatattaaattttaaatcttggaaattctcataatccagcttatgactaaagcgtgtcatcgttgctggtgatgtaccaatcgcatgggttaaggagttaatcgttgaaaaggcatcgctataaccattttgtcttatataattgacgatgcgtttatcagtttttgtaaataaatgttgataacgttgaacacgattctcaaatttcattgtgtcaccccttcatcttaatgattactattatatatgaaaaatattttcaagatagtaaaaagcattgataaaaattatcttaatgatatattgtaaatgactttacgtgaaaaaaacgacttatggagtgaggaataatgttaccacatggattaatagtatcttgtcaggcactaccagatgaaccattgcattcatcttttattatgtcgaaaatggcattagctgcgtatgaaggtggtgctgttggtattcgcgcaaatactaaggaagacattttagcaattaaagaaacggtagatttaccagttattggcattgtgaaacgtgactataatcactcagatgttttcattacagcaacgtcaaaagaagttgatgaactgatagaaagccaatgtgaagtcattgcattggatgcaacgttacagcaacgtccaaaagaaacgttagacgaattagtatcatatattagaacacatgcaccgaacgttgaaatcatggctgatatcgcgaccgttgaagaagctaaaaatgccgcacgacttggctttgattatattggcacgacgttacatggctatactagttatacgcaaggacaattactttatcaaaatgacttccaatttctaaaagatgtactacaaagtgttgatgcaaaagttattgcggaaggtaatgtcattacaccggatatgtataaacgcgtgatggacttaggcgttcattgttcagtcgttggtggtgcgataacacgaccaaaagaaattacgaaacgttttgttcaagttatggaagattaaatgataacgataaaaaaacgagatgaccatcattaattaaaggtacctaattatcttaggtggctgaatgaatgtaatgggttcatctcgttttgtttgtttacgatagtgattttattttcaatttgaattatccaaaaataagtaaagcgacggggatggtgattaatagcgacaatgccacgcgtaaaaaccaaatgatgatgagtttccagacaggtattttaatttcagttgctagtatacatggcactaatgctgagaaaaagataatggctgatacgcttactacaccgacgacaaatttagtactcattgcagctttagttactaacaaagatggtagaaacatctctacaatagaaatcgctgacgcttttgcaagtaaagcctgatcagcaattgggaaaatataaataaatggatagaagatatagccaagccaatcaatgaatggtgtatagttcgctacaatcagtcctaaaaaaccaatcgataatatagaaggcaaaataccaacagtcatttctaaaccgtctttcaaattgtcccaaacgttcttcacgagggatggtgttaatgcattttgtttcatcgcctctgcatatgcagttttcagtctgcttccttcaatagcaacttcttgttctccttcttgtccgttataatattctgttgattcattggtgattggcggtagccatgcagtaattgcagtcacgacaaatgtgatgactaaagttatccaaaagtataaattccaatgcggcattaatcctaaagttttagcaacgataatcataaaagttgctgaaactgttggaaagccagtcgcaataatcgtggcttctcgtttgttgtacatcccttgcttatagacacgattagtaatcaataatcctaaggaataactgccgacaaacgaagctactgcatcgacagcggattttcctggtgttttaaaaataggtctcataataggctccatataaacaccgacaaattctaataagccatagcctactaataaagaaagcgcaattgcacctactggaattaagatacttaatggcatcattaatttttcaaacaagaacggaccatagttagctttaaatagtattgatggaccgattttaaatacatacattataccaatcattgcacctgcaactttaaataatgtaatgaccaagtttgtgattgaagtcataaaagtacgtctcactattggtaacgctgtaccaattaaaatcataatcagtgcaacatagggcataagtggacctatgattgagcgaatggctagatgaacatgatcgacgaaaatagtgttgttaccattaatcgtaaaaggaataaagaaacatagtatgcccactaaactatagacaaaaaaacgccatgcacttggttgttgtgcattagaatgatattgattcattaaagcaacccctttgtttaaatgaatacacaaaactgtatgatgcatcttccccttaatgagatgaatcattattttaatttagaaaaatctgaaaacttattataattgtatagtttgaattattttcagaccaatacaaattaactaattatatatagattgaaactatattacttaataaaatatttatcttaaatgttgttgtgatgattcaacgccacaactaaaagtgtttataaattatttggaaatgcacatatttgtaaatgattagtatcgatttaatatcgtattattaaatttttattaattttgtagtcttaatcaaaaaataatatatgtcatgttatattgaaggtgcagttgtttttcattctcaagagggggtcaaaaaaatacttttgaggtgattatatgttaagaggacaagaagaaagaaagtatagtattagaaagtattcaataggcgtggtgtcagtgttagcggctacaatgtttgttgtgtcatcacatgaagcacaagcctcggaaaaaacaccaactaatgcagcggtacaaaaagaaacactaaatcaaccgggagaacaagggaatgcgataacgtcacatcaaatgcagtcaggaaagcaattagacgatatgcataaagagaatggtaaaagtggaacagtgacagaaggtaaagatacgcttcaattatcgaagtatcaatcaacacaaaatagtaaaacaatcagaacgcaaaatgataatcaagtaaagcaagattctgaacgacaaggttctaaacagtcacaccaaaataatgcgactaataatactgaacgtcaaaatgatcaggttcaaaatacccatcatgctgaacgtaatggatcacaatcgacaacgtcacaatcgaatgatgttgataaatcacaaccatccattccggcacaaaaggtattacccaatcatgataaagcagcaccaacttcaactacacccccgtctaatgataaaactgcacctaaatcaacaaaagcacaagatgcaaccacggacaaacatccaaatcaacaagatacacatcaacccgcgcatcaaatcatagatgcaaagcaagatgatactgttcgccaaagtgaacagaaaccacaagttggcgatttaagtaaacatatcgatggtcaaaattccccagagaaaccgacagataaaaatactgataataaacaactaatcaaagatgcgcttcaagcgcctaaaacacgttcgactacaaatgcagcagcagatgctaaaaaggttcgaccacttaaagcgaatcaagtacaaccacttaacaaatatccagttgtttttgtacatggatttttaggattagtaggcgataatgcacctgctttatatccaaattattggggtggaaataaatttaaagttatcgaagaattgagaaagcaaggctataatgtacatcaagcaagtgtaagtgcatttggtagtaactatgatcgcgctgtagaactttattattacattaaaggtggtcgcgtagattatggcgcagcacatgcagctaaatacggacatgagcgctatggtaagacttataaaggaatcatgcctaattgggaacctggtaaaaaggtacatcttgtagggcatagtatgggtggtcaaacaattcgtttaatggaagagtttttaagaaatggtaacaaagaagaaattgcctatcataaagcgcatggtggagaaatatcaccattattcactggtggtcataacaatatggttgcatcaatcacaacattagcaacaccacataatggttcacaagcagctgataagtttggaaatacagaagctgttagaaaaatcatgttcgctttaaatcgatttatgggtaacaagtattcgaatatcgatttaggattaacgcaatggggctttaaacaattaccaaatgagagttacattgactatataaaacgcgttagtaaaagcaaaatttggacatcagacgacaatgctgcctatgatttaacgttagatggctctgcaaaattgaacaacatgacaagtatgaatcctaatattacgtatacgacttatacaggtgtatcatctcatactggtccattaggttatgaaaatcctgatttaggtacatttttcttaatggatacaacgagtagaattattggtcatgatgcaagagaagaatggcgtaaaaatgatggtgtcgtaccagtgatttcgtcattacatccgtccaatcaaccatttgttaatgttacgaatgatgaacctgccacacgcagaggtatctggcaagttaaaccaatcatacaaggatgggatcatgtcgattttatcggtgtggacttcctggatttcaaacgtaaaggtgcagaacttgccaacttctatacaggtattataaatgacttgttgcgtgttgaagcgactgaaagtaaaggaacacaattgaaagcaagttaaattcatcttctgaatttaatatgctatgtaaatcgtgctgttatcatggcacatcagatataagtagcatcacagtgttgaatttaaaaatagtaaagtgaaataaagcgcctgtctcattagcgaaaactaaagggacaggcgtatctgtttatgagcttaataaattgtatgaataatatggttgatcgaataactgtttatcatgatgataaattgagttttttaaaataatgatatattacatcattgttatagcgtttaagaaatcaacaactttacgataaatagtgattgcttcgtcattaggtctacgatcaaaatcatgctcgtttttattcacgcgttcaaatgttgaatgtggaacatgattcatgatatgttcgctttcctcaacgggaacatcataatcgccattacaatgcgcaatgaaaacaggtggaagtgttttaagttcatctggtgcaatattatattttgaatcagtataatcagcaatgttaatcatatttatccatttacctgtgccacgtgcataaacgtagattaaaaaacgttgtgcgatttgatcttgaacaaccggtgttggtgaagtgagttgtgcaatcattgtttcgtttacgctttgagctatttttgcgtaataactattagttgttttaaaaggttcagtgttgatgcgactataaccataaaaatcaataacaccatcaatatctctgtctcgtgcaattaatagacttaaatatgcacctgatgatctgccaaaggtaaaaatagggcaattagaatattgtgattgaatcgcatcgaatgatgcgtagacatcctcaataatgcaatcgagacttacttctggtaataaacgataacttagttgaattaaatcgtaatgttccgtaaggatatcgatatactgtggggataaatcgttagctttaccgaacattaatccaccaccgtggatgtagacaatagcgccttttgttggttgattttttgctttaataattgtgtaaggtaatgcaaatgcatctttagtaattactttatctttaatttcagtcacgatttaataggctccttatttttgatattgatgtcattataacactgtcttaaatttccatgaaaaatagtcttaagacgatgagtcatgataattctgttccaattgacgtaaagcgtcacgggtatgcttctttagaccttccccataatccatcattttaacaatatctttaaaagcagcatgtggaatggctaaatcttctaaatctgccatagaaaattcaagattgatatcatgtggtcgctgttcagcaagtttatgcacaaagtcaggttctgtgacaaaaggcgaagacatgccgaccatatctgcatgttgtaaagcatctaaagcagactctggagaattaatcccgccacttgcaattaaagggatacgacctgctaaatgttcatagacaatttggttaactggtcgaccgaaatgatcacctggtgtacgagacgtattttgataaatatgtcgaccccagctagcgattgctaagtattggatgtttgaaacgtccatgacccaatcgattaattggttgaactcgtcaatggtatatcctaaatcactgcctctggtttcttctggcgttgctcgaaatcctaaaataaaattgtcaggtgcttctttatcaatcacttcttgtaccgcacgcataacttctaaacataatcttgcacgattttttaatgagtcggcaccgtaatggtctgtacgtttattcgaaaaagttgagaaaaatgtttgaatcagcaaacgttgtgcaatcgaaatttccacaccatcaaaacctgctttaatcgcgcgtaatgtagcatcgcgatactgctgaatgatgctattgattttctcatgagacatggcgataacatcgtgttcaatcggtgaatgcaatgtcatagggcttggtccatacacctttccaaaatttaaaatggcttgatttgaaaaacgaccagcatgcgctagctggataatagcgaggctaccatgttgtttcatcgtagatgccatgttagttaatccagggatacaagcatcatgatcaatattaaagccatattcaaacaattgaccataaggttcaatgtaagcagcgccggtgacttgcattccagctgaattagagcgacgtgcagcataagccaagtcttcttttgtaatatagccttcttttgttgatgtgtttacggtcattggtgataatacaaagcgattcgaaattttgatgccattaggtaagtggattgattgtaaaagtggtttgtatcggtacatactatgattccttttctattcaatattgttttcaaagtaccatggaaagaatgaataatcaatgatgaacagtcttgatagaatagaattggtacatggaaagtatttttaaaattaaactaatgaatggcatttgtaggtctgaaaatatgaatatgaaaaagaaaaataaaggcgaaaagatataaaagttaattgaaaaacgttatcatatacgtgggtatatgaagagggaatggtattaagaacgctaaaatgttatgtcggtttgacatgacaggataagtttggagatgacggattggttaaattaagcgtattagactatgccttaatagatgaaggtaaggatgcacaaaaggcattgcaagattcagtgacacttgcaaaattagcagatcgacttggctttaagcgaatttggtttacggaacatcataatgtaccagcgtttgcgtgtagtagtccagaacttttgatgatgcatacattggcgcagacaaatcacatacgagttggctctggtggtgtgatgctgccgcactatcgaccttataaaattgctgagcattttagaatgatggcagcgttatatccaaatcgtattgatttaggtattggtaataatccaggtactactatggtaaagcaagctttagatggaataaatcctacatatgatagttacgatgaatcgatttcgttattacgtgattatcttacaataaaggataaaccaagtgcgcatacgttaggtgtccaaccacacattgatcattttccagaaatgtggttattaagtagtagcgcaacatctgccaaaatagctgccgaactaggtatagggctttctgttggaacatttttgctaccagatataaatgcgatacatgcagcgaaggataacattgatatttacaaaaaacatttccaagcatcaacgattaaaatggacgcaaaggtgatggcatctgtatttgtcattgtagctgataacgaagcggaagtagcagcattacaacatgccttagatgtttggttattaggtaaattacaatttgcagaatttgaagattttccttcagtagacacagcacaaaagtataagcttaatgatcgagacaaagagatgattcaagcacatcaagcacgcatcattgcaggtacacaagaaaaggttaaagcacaattagatgatttcattgctacgtttgaagttgatgaggtgttagtagcaccgcttattccaggtattgaacagcgttgtaaaacattaaaattactcgcggaaatttatttgtagcattttaaatagaagagaaaggatgaagataagatgaaaaagttagccaattatttatgggtagaaaaagtaggagatttgtatgtgtttagtatgacacctgaattgcaagatgatattgggacagtaggttatgttgaattcgtaagtccagatgaagttaaagtggatgatgaaattgtgagtatcgaagcatcgaaaacggtcattgatgtgcaaacgccattgtcaggaacgattattgagcgaaatacaaaagcggaagaagaaccgacaattttaaactctgaaaaaccagaagaaaattggttgttcaaattggatgatgtcgataaagaagcattcctagcattaccggaggcttaaatggaaacgttaaaatcaaataaagcgagacttgaatatttaatcaatgatatgcatcgagagagaaatgacaatgacgtattggtaatgccatcttcatttgaagatttgtgggaattatatcgaggcttagcaaatgtcagaccggcattacctgtaagtgatgaatatttagctgtacaagatgctatgttaagtgatttgaatcgtcaacatgttacggatttgaaggatttgaagccgataaaaggtgacaatatctttgtttggcaaggtgatatcacgacgttaaaaatcgatgctattgttaatgctgcaaatagtcgttttctaggatgtatgcaagctaatcatgactgcattgataatattattcatacaaaagcgggtgttcaagttcgacttgattgtgcagagatcattcgacaacaagggcgcaatgaaggtgtaggtaaagccaaaataacacgtggatataatttgccagcaaagtatataattcatacggttggtccgcaaatacgtcgattgcctgtttcaaagatgaatcaggacttgttagctaaatgttatcttagctgtcttaaattggctgatcaacatagtttaaatcatgtcgctttttgctgtatatctacaggtgtatttgcttttcctcaagatgaagcagcagaaattgctgttcgaacagtagaaagctatctcaaagaaacaaattcaacattgaaagtcgtgttcaatgtatttacagataaggatttacaactgtataaggaggcatttaaccgtgatgcagagtagtaagtggaatgcaatgtctctgttaatggatgacaagacaaagcaggctgaagtattgcgtactgcgattgatgaagcagatgcgatagtgattggaattggtgcaggcatgtctgcatctgacggatttacatatgtaggagagcgttttacggaaaatttcccagattttattgaaaaatatcgcttctttgatatgttgcaagcgagtttacatccttatggcagttggcaagagtattgggcatttgagagtcgttttattacattaaactatttagatcaacctgtaggtcagtcttacctcgctttaaaatccttggtggaaggtaaacagtaccacattataactacgaatgcagataatgctttcgatgtagctgattatgatatgactcatgtatttcatatacaaggggagtatatactgcaacagtgtagtcagcattgtcatgctcaaacgtatcgcaatgatgatttaattcgtaaaatggttgttgcgcaacaagatatgcttataccttgggagatgattccaagatgtccaaaatgtgatgccccaatggaagtgaataaacgtaaagcggaagttgggatggttgaagatgctgaatttcatgcgcaactacatcgttataatgcttttctagagcaacatcaagatgataaagtgttgtatttggaaattggaattggttatactacaccacaatttgtgaagcatccttttcagcgtatgacacgtaaaaatgaaaatgcactttatatgacgatgaataaaaaggcatatcgcattccgaattcaattcaagaacgtaccatacatttaactgaggatatctcaacattgattacaacagcactccggaacgatagcacaacgcaaaataacaacattggagagacaaaagatgtacttaatagaaccgattaggaatggagaatatattactgatggtgcgattgcactcgctatgcaagtttatgttaatcagcatatctttttagatgaagatattttattcccttattattgtgatccaaaagtggaaattggacgttttcaaaatactgctatagaagtgaatcaagattatatagataaacacagtattcaagtagttcgccgagatactggtggtggcgctgtgtatgttgataaaggtgccgttaatatgtgttgtattttagaacaagacacttcaatttatggtgattttcaacgattttatcagccagctataaaggcgttgcatacattaggtgcaacagatgtgatacaaagcggtagaaatgatttaacattgaatggtaaaaaagtgtcaggcgccgcaatgacattaatgaacaatcgtatttatggcggttattcgctattacttgatgttaattatgaagcaatggataaagtgttaaagcctaatcgcaaaaagattgcatcgaaagggattaaatctgtgcgcgcacgtgttggtcatcttagagaagcactggatgaaaagtatcgtggtataaccattgaagaatttaaaaatttaatggtgacacagattttgggaatcgatgacattaaagaggcaaaacgatacgaattaacggatgcagattgggaagcgattgatgaattagttgataaaaagtataaaaattgggattggaattatggcaagtcacccaaatatgaatataatcgaagtgaaagattatcatcaggtactgtagatattaccatttctgttgaacaaaatcgtattgcagattgtagaatttttggtgatttctttggacaaggtgatataaaagatgtggaagaagcattacaaggaacaaaaatgacaagagaagatttaacgcatcagttaaagcaattagacatcgtttattattttggtaatgttacggttggatcattggttgagatgattttaagttaatattgtttaggcgttaatgtcgcaccctcaatgaatatgtgtatttgcttttaaaatggtgactatgtagttatgtaatttgaacatacgattgaaaatgaatttagttaattagcaaagacatcatatttatagcgtttgtgtttctaaatgattgggtatttgaaaatggttaatgatagtttttaaaggaataaattcattttcatttatataagtaagattaaatactagctactaaagtctatttatatacgtcaaaatataatgactgctataatgagtaatcaatagacacaaagaggagattatgtgatgaataataaagtattagtaaccggtggtacagggtttgttggcatgcgaattatttcacgattattagaacaaggttatgaggtacaaacaacgatacgtgatttaagtaaagctgataaagtaattaaaacaatgcaagacaatggcatttccacagagcgattaatgtttgtcgaagcggatttatcacaagatgaacattgggatgaagcaatgaaagattgtaaatatgtcttgagtgtagcatctccggtgtttttcggtaaaacagacgatgcagaagtgatggcgaagcctgccattgaaggcatacaacgtattttaagagctgcagaacatgctggcgtgaagcgtgtggtgatgactgcaaactttggtgcagttggttttagcaataaagataaaaattcaatcacaaatgaaagtcattggacaaatgaagatgaaccaggcttatcagtatatgaaaaatcaaaattgttagctgaaaaggcagcgtgggattttgttgagaatgaaaatacaacagtagaatttgccacaatcaatccagttgcaatttttgggccatcattagatgcacacgtttcaggaagctttcatttattagaaaatttattgaatggttcaatgaaacgtgtaccgcaaattccattgaatgttgttgatgtgagagacgtagctgaactacacattttggcaatgacaaatgaacaggctaatggcaagcgatttattgctacagctgatggacaaattaatttgttggaaattgcaaaattaattaaagaaaagagacctgaaatagctcaaaaagtttctactaaaaaattaccagactttgttttgagtctaggtgctaaatttaatcatcaagctaaagaaggtaaacttttattagatatgaatcgaaatgtaagtaacgaacgtgcaaaaatacttcttggttgggaaccgattgcgacacaaaaagaagcaattttagcagctgtcgatagtatggctaagtatcatttaatataatacaaaacaccgtccataagtaagtggctttcctcttgataaaagaggcattcactcaatatgtgacggtgttttatatatttacgttaacactattgctgtggcttttgacggccttttaataaaattgctgtcgcacctacgataataataaatagaatcgcaccaaataatcccatatattttactgcgttaccgaacacgataccgacagttaaaaagtctgtatctgagaatgttgttgcagcaccacctaattcgcctaaaaatggcaagaataataatggtaaaaacgttattaggataccatttagagcggcgccagcaacagcacctttaataccgcctcttgcattaccgaatacagcagccgttgcacctaagaagaagtgtgcaactacgccaggtaaaatgacgacgccaccaaataagaataagataaacataccgatgacacctgtaataaagctgacaaagaatccaattaatactgcattttgtgcataagggaacacaatagggcagtctaatgcaggtttagaatttggtacaagcttttcagaaattcctttaaatgctgggacgatttcagctaagattaagcgaacgcccgttaaaataataaatacaccagcagcaaatgtcacaccttgaattaatgaaaagacaataaagttttgaccattactaatagactcgtgtacataactaacgcccgcaaataagcatgcgatgaagtaaagtaatgccatcgtaatcgagatactaattgtactttctcgtaagaaacttaagccttttggaaatttaatctcttccgttgatttagacttacctttgaataattgacctacagcacctgcggcaaagtaactgattgagccaaaatgacctaaagctacttggtcattccctgtaatttttcgcatcgtaggttggagtaatgcaggtaatactgccatgattaatcctaatacgagtgcgccgataacaatcgttagccagcctttaatatgactgactgttaaaatgattgctaaaaacgcagccatgtaaaatgtatgatgacctgttaaaaagatatattttaaattagtgaagcgggcaattaaaatattaacaatcatgccacagaccatgatgagtgcagctgttgttccaaaatcttttaaggctagtgagacgatagcttcgttgttaggtacgataccttgcacaccaaatgcgtgttggaatattttgccgaatggttcaagagatcgaacgacgacatcagcacctgcacttaaaattaagaagcctaatatcgttttaatggttcctgaagtgatcgttgcggcaggttttttctgaacgattaaacctataaaggcaatcagtgcaacaagaatggctggttgacttaaaatatcgactataaaattaaggattgcttgcataggtcgtacctcctttaaatcatgttaagttgttgtaatttttctgagagcttttgttgtaattcagctttatctaaaatattatcaagaactaagacatcccctagacgttcggcattttcagctaaatctctaccacaaataaacaagtcagccatctctggacttgctgtcataatgtcactatgttcaacttcgatatcagatggtgcattaagttgcctaagtgcttcttgtgcgttcatttctaccataaaactacttcctaaaccgtggccacatactactaaaattttcatattaatcatgctcctttaaaatgtttttaatgtcttgtgcatttgttgcagttaatagttgctggactgtttggttatcgcccagtacggttgctaaattttgtaatacagataagtgtgaatgattgtcgatggcactcaatacaaaaatgagagatgcgtagtgatcttcatcacaaaatgccacatgttgattcaactttaatagacttaaaccaacttgatgtacgtcattgttcggtcttgcatgtgcaattgcaatttcaggtgcgataacgatataaggtccaagttcattaacgctatcaatcattgcttgaacatagccttgttcaataatttgttcttgtagtaatggctgagaagctatagttatagcttcagtccaatcatttacttgttcttttacaatgatgcgtgttgttgacaaaatgtctaatgacacgttattaagcctcctttgtcatagttaaagcaatgtgttgtttaattttaaaaatattcccatctaagaaatcttgtcgatataagtcgttgcttaagcattcgcttaactgtcccaatgcctttaaatgtgcattggggtggtccgttgctaatgtaattacaaggtgaacgggatcgttagctttactaccaaagataatcccttcagtgaaatatgttagtgcgaaacctacaccattctgtacataatcagtaccagcgtgaataagtgcaatatgtggactaatgaccatatatgacccgaattgttcaaattgttttaaaattgcagctgtataatttgaatagacaatgccatcattgattaaaggttgcacagccactgcaattgcggattcaattgataatggttgtttatttataatgatgcgatgttcaggcaataaatctgcgagtgacttgccatcagttgccattttcatgactcgttgttctcttgagtcattgataatttgattcaatttttgacgagattgttgattgataaatggatcgacatgaataactggtacagctgatatttcacaaggtactgttgaaatgacataatcaatgttatcttgcaataatcgactttcttccaattgataaatggaataggcatcccaaatgtgaaactcaggatacaggtgatttagttttgattttaaaagttgtgacgtgcctataccagaaccacatagtaagacaaccttaatcattgattgtttatgtgttgcaacacgctctatacttgatgcgaagtgaattgtaatgtatgttaattcatcttcgttgaagcgaatagcagcatcttgttcaattggactaatatgcttgctaacggcttcaatgatttgaggatagcgacgcataacttcttgcctcaaaggattaggttgtagcatatcgtatttaatacgatgtatagctggtttgatatgtgtgatcagactggtatgtaacttgttgtcttttgacatatcaatgcctaattcttggctaacacaagtgatcaattcatgtatattttgcgataaatcatggtattcaaaggtaattgaagatgctgtatgttcagtcattttagagcctagtaaatgtaacgtgataaagataatttcagactctggaaatgtgacattacaactgcgttctaagttttctatcatttttgaagcaatagcatactgattagtatgtcgccatttatcaatttcattgataggtatatcgaacgaaaaattttcatttaaacgctgaatggcaatgagtatatgatagattaagccatcgatagccgactgaactaaatgataattttcactatttaatgtcttaataatggcacggcgaaccaatgcgattgattctgaattaaagatatccgcctctataaaaggtgcagcttgtttcatatattgatgtataaagtgtgcatacgctttacgataatgatcttcctcaccaataatattgaatcctttattgtggacataatttaactttaaatggtattgatctagttgggcttgaatcattttaatatcatctgcaattgtccgacgcgaaacattaacatcttgcgcaagttgctttgttgaaacaggatcggttgtttcgaataactttaaagcgatatgtgtgagtcgttcatcttttgaaaaatgaatttgatttgttagattgtgctctaattcatttaatagtgtcgcgtgagctgttgttactttgatgcctgcagctttattacggctgacttggtaatgataagtttcagcatattgctcaatatatgctatatcatattgaatggtacgaggtgatacaccaagttgattagcaatggtattgattggaataaacgtttgctcatgaattaaaagatacaaaatttcgatttgtctataacttaacaacgtaatatcctcctatttgtaattgtaagcgatttcttaaaaacgtagatatgcaatctctttcatattttaatccgaaaaattgcatatcaaaatgtttatggcgcaagattttataggaacttttaaaataaattagatattcatgttgacaatttaaaaatgtcgcagtatatttagttagacatctaacgaaatggtggtgcaataaatggaattcacttattcgtatttatttagaatgattagtcatgagatgaaacaaaaggctgatcaaaagttagagcaatttgatattacaaatgagcaaggtcatacgttaggttatctttatgcacatcaacaagatggactgacacaaaatgatattgctaaagcattacaacgaacaggtccaactgtcagtaatttattaaggaaccttgaacgtaaaaagctgatctatcgctatgtcgatgcacaagatacgagaagaaagaatatagggctgactacctctgggattaaactcgtagaagcattcacttcgatatttgatgaaatggaacaaacactcgtatcgcagttatctgaagaagaaaatgaacaaatgaaagcaaacttaactaaaatgttatctagtttacaataaatgataagtgtgactggtagaaatcagtcactttgtctttaatattatagttagatatctaattgttagtaagctaattattggaaaagacaaggagtattgaacaatgaaagacgaacaattatattattttgagaaatcgccagtatttaaagcgatgatgcatttctcattgccaatgatgatagggactttattaagcgttatttatggcatattaaatatttactttataggatttttagaagatagccacatgatttctgctatctctctaacactgccagtatttgctatcttaatggggttaggtaatttatttggcgttggtgcaggaacttatatttcacgtttattaggtgcgaaagactatagtaagagtaaatttgtaagtagtttctctatttatggtggtattgcactaggacttatcgtgattttagttactttaccattcagtgatcaaatcgcagcaattttaggggcgagaggtgaaacgttagctttaacaagtaattatttgaaagtaatgtttttaagtgcaccttttgtaattttgttcttcatattagaacaatttgcacgtgcaattggagcaccaatgatttctatgattggtatgttagctagtgtaggcttaaatattattttagatccaattttaatttttggttttgatttaaacgttgttggtgcagctttgggtactgcaatcagtaatgttgctgctgctctgttctttatcgtttattttatgaaaaatagtgacgttgtgtcagttaatattaaacttgcgaaacctaataaagaaatgctttctgaaatctttaaaatcggtattcctgcatttttaatgagtatcttaatgggattcacaggattagttttaaatttatttttagcacattatggaaacttcgcgattgcaagttatggtatctcatttagacttgtgcaatttccagaacttattatcatgggattatgtgaaggtgttgtaccactaattgcatataactttatggcaaataaaggtcgtatgaaagacgttatcaaagcagttatcatgtctatcggtgttatctttgttgtatgtatgattgctgtatttacaattggacatcatatggtcggactatttactactgatcaagacatcgttgagatggcgacatttattttgaaagtaacaatgacatcattgttattaaatggtataggtttcttgtttactggtatgcttcaagcgactgggcaaggtcgtggtgctacaattatggccattttacaaggtgcgattatcattcctgtattatttattatgaatgctttgttcggcctcacaggtgtcatatggtcattattaattgctgagtcactttgtgctttggcagcaatgttaatcgtctatttattacgtgatcgtttgacagttgatacatctgaattaatagaaggttaaatatttcgtacacttctggctgagtatatttcggtcggaagtgtatttttcgaataaaaaataaatatatgatacgattatgaaaaaaataaagtgagaatgacatatgtataaatctaaaatactgttgaaatatatttttagtgaagaaccagaagttaaagatttaactgaagaaaaatataatcaagattacgaagcattaacatttagctttaaagaggaaacatatcaaagtaggttagctaagaaaacaccgactaaagcagggtattttgttacatgttggacaaaagacgagaacaattgtaatcaaccatactcaaaagaggcatttgcagattacttaatgattatagttattgatgaagaattaagcggttattttttatttcctagggaattattggtagaaaaaggtatcttaactacatttgaacataaaggtaagatggcttttagagtttatcctaagtggtgtaatcaattgaataaaacagcagggcaaacacaaaagtggcaatgtaaatatttttttgaatactaataaaaagtcatatggttgaacttataagagatgaatatatcatctttcgataagataaccatatgactttattttttatcatttaatgatgaacggtttcttgtcctactttattccaagtgaggataaagctcaacattgcaaacacactgattgctgttaataaaataaaaccgacatcccatccgaatttatcaactacagcacctaagacgatgttggccattacagcaccaaacagataaccaaataatcctgttaatccagctgctgtgccagctgcttttttaggtacataatctaatgcttgtaaaccaattaacataactggtccatatattaagaaaccaatggcaattaatgagacattgtctaaccaagcattgcctggaggatttaaccaataaattaatacaaatactgtgacacctaacataaagaagaaacctgcaggtcctcgacgacctttgaataatttatcagaaatgtaaccacataataatgtaccaggaattccagcccattcgtataagaagtatgcccaacctgatgcttttaagtcgaaatgcttttcttcacttaagtagactggcgcccaatcaagtacaccataacgcacgaaataaacaaatatatttgcaaaggcaattgcccatacccatttattgtttagtacatatttaaataaaatttcttttgtagttaattctgtttctaatgttttcttatcgcttgtagcaaagtcgtttttataaatttcgattggaggtaaaccttgagattgaggtgtgtctctaatcaatacgtatgaaattgcggcaatgataagtgctaagagtgcagggtaaatgaatacaccttcgaacccttttaaataaccaaagttgataaatgctgttgttgtaataccccaagcagcaataggtgccataatacctccaccaacattatgcgcaacgttccaaagggcagtcttacttccgcgttcacttacactaaaccagtgaacgagaacacggcctgaaggtggccagcccataccttgaaaccatccatttaagaataataggacaaacataataccgatacctgatgtaaagaacggtacaaatcccattaacaaattgacgatagcagtgagtgctaatccaagaactaagaatatccgagcattgctccgatcacttacagtacccataaagaacttactaaatccatatgcgatggaaacagcagaaagtgcaaaacctagttccgcttttgtaaaaccttgctcttgcaatgctggcatcgctaatgaaaagtttttacgtaataaatagtacccagcgtaaccgatgaaaataccaagaaatacttggagacgtaatcgtttataggtatcatctatctgattttctggcaaaggcttaatatgctttgcaggtttaagaaaattcataaaatcctccttaatatgtatttatatgcattttgtgcgataaacttatattagacatgtatgaaagcgttgtcaatatacttttgtgaaatcttgcatatttagttattgaagtattttataaacatttagaaaaaataaattgctacacataaatttataattatgcaattattatgtcgttatacatactagctgtgtatctacgaatgagtacaaacatatttttatttgcagaaaaggggtaaatggcatataactatcttttttatgtaagttggtataaaatttatactaataggagggatagtatgaatatagtagggcatcatcacatatccatgtatacaaaagatgcaaaacgtaataaggatttttacacaaatgtccttggattacgattagttgaaaagtcggttaatcaagacaatccttcaatgtatcatttgttttatggggacgaagtaggtacagccggaacaattttaagcttttttgaaattcccaatgcgggtcataagcagccaggtactgaaacgatttatcgattttctttattagtaccaaatcaagcggcacttcattattttgaaaaacgccttgataataatggtattacgtctgaacgtttgtactatcttggacaagaaggtgttgtctttaaagatgaagacgacttagaaatcatattgcttgttaatgatagttttgaagtaccacatcaatggcaacataacgtttatagtgaaatacctcaagcatatcaaattttaggaatagggccagtcgaattaagagttagaaatgcagcgcgtacggtagaatttttggaaaatgtcttaggttatcgcaaaagagataataaatcattcgatgtgctgacattagcaccacaaggtttatattcggattttgtagttattgagcaacagggacaacgtgaaagacctggacgaggttatatccatcatattgcaattaatacaccacaaatgagtgacttagatgcaatttacaagaaattacaacaacaaacacaaagtaattcaggtataattgatcgctatttctttaaatcattatactatcgccataattcaattatgtatgaatttgcgactgaagcgcctggatttactattgatacacctcttgaacaattaggaagtcaattgaacttgcctgactttttagaagcagaacgtgaacaaattgaaagtaagttacacgaaatataaaggagaatgtttaatggcaaaattagaaatgaataaaaatacacctcttgagtttggtttgtattccttaggtgatcatttattgaatccattgaaaggtgaaaaagttagttatgagcaacgtattaatgaaattattgaagcaagtaaattagcagatgaagcaggtattgatgtttttgcagttggtgaaagtcatcaggagcattttacaacacaggcacctacggttgtgttaggtgcaattgcccaagcgacaaagcatatcaaagtttcaagttcttcaacgattattagtgcaacagatcctgtaagagtatttgaagacttcgcgacattagatttgatttctcatggtagagccgaaattgtagctggcagagcatcaagaacaggtatttttgacttgtttggctatgatttaaaagactatgatgaattgtttgaagaaaaattaggtttacttttagagttaaataaaactgagcgtattacttggtctggaaaatatcgtccagaacttagaaatatgaaaatattcccaagaccaatcgataatacattgccaatatggcgtgctgttggtggtccacctgcaagtgctattaaagcgggaaaacaaggtgtgccaatgatgattacaacccttggtggcccagcaatgaactttaaaggttctatagatgcttatcgtcaagcagcaactgaagcaggtttcgatgcttcgcctaagtctttaccagtaagtatagcgagtctgttttatacagctgaaacaactcaggatgctatgagagaattttatccacatttgaatacagggatgtcatttattcgtggcgttggttatccgaaacagcaatttgctaattcaccagattatagagaagcgctaatggttggaagcccgcaacaaattattgaaaagatattgtatcaacacgagttgtatggtcatcaacgttttatggcacagcttgattttggcggtgtgccatttgaaaatgttatgaagaatatagagttaattggcaacgacattataccggcgattaaaaagcatttatcaaaataggaggggcgtcatcatgaatattgtattattgtcaggttccacagtaggttctaaaacgagaattgctatggatgatttaaaaaatgaactagaagtcatcaatgagggacatcaaatagagttgatggatttacgagaacttgaattagaatttagcgttggaaagaattatctagatactacaggagatgtatataaattaacgacgtcgttaatgcaggctgatgtgatttttattggttttccaatttttcaagcttccatccctggtgctttgaaaaatgtgtttgatctacttccagtcaatgcgtttcgtgacaaggtaataggacttgtagcgacagcaggttctagtaaacattatttaattcctgaaatgcatttaaaaccaatattgagttacatgaaagcacatacgatgcaaacgtatgtatttattgaagagaaagatttttcaaatcaacaaattgtcaatgatgatgttgtatttcggttaaaagcgttggcacaatccacaatgcgaactgccaaagtacaacaacaagtgtttgaagaagaaaacaaccaatacgacttttaaagtataaaaataagacgctcggcacactaaatttgcaagtgtttgagcgtcttttcatattaactatatagccaatgaacgacgataaaggcaagtgatgacaagcatattgaggtaataatgattgtcataagcggtttaagtgcgcgatttttaagatctttaaatgcaacatttaaccctaaagcaaccatggccattaataagcaaattgttgatacagtatttaaaatatttagcaatgctgacggaatagttacatatgtattcactaaggccataatgacaaatccaattaaaaagtatggaatgcttattcgaccattgctagatgattctgatgaacggaaacgcataattaaaataagtacgatggttaatggaatcagtaagaatactctgccaagtttaccaagaagtgcaattttaagtgcatcactaccaccaaagccaccagctaggacaacgtgtgcaatttcatgaagactaacgccagaccaagcgccataaacatttgtcgtcattgaaaagatagcatagatagctgtatatataagtgaaaatatcgtaccaatcaatgcgatgataccgatactaatagctgtatccttttcacgtgatttgaatattggagcgactgcagcaatagcggcagcaccacaaacgcctgtacctacacctagtaataatgcgatgtttttgtcaccatgcaacagtttgttgacaaagagcatcattacaatactaaaaataacgacacctacatcgatggctaatagtctactaccttgaccgataatatcgaatatattgagtttaagtccatataggatgattgcaaatcttaataaatatttagatgaaaacgtaatacctgagctatattgttcaggatatcctctaaagtgacgatatagaatagcgattaatatcgcgatagttaatgcgccaaccttatctaagattggcaatttagcagctaaaaagctaaataatgcgactataaatgttaatgttagtccaatcataaaatgcttatttttcaatgatgccatgagcagtgcctcctttaatagcattttagcactgttttgtcgtatttttaaatataaatttggaatggttaataaagtagagattaaattaagttgtgtgataggaaacttggacatcaatcaaagtaataggcactacaacgcttattggcggggccccaacaaagagaatttcgaaaagaaattctacaagcaatgcaagttggggaaggacaacaaatttaagatacaaggcgtaatattaatatgttattattatgataatttacaaaattatatgaaaaataaatgagggtgtgatggtatgtttggaatgaaagtgaatgaacaaataatattaaaaattttagaagcccatgacacagaagcgcttttcaatttagtcaatcgttcaagaaattcacttagggaatggttaccttgggtagatgcaactgagcaaccatcagatacgcgtgcgtttattaaaagaggacttttgcaattttctgatggtaatggatttcagtgtggcatttggtatgaaggaacgctagttggtgtcatcggtttacatgaaattaatcgcatgcacagaaaaacttcattaggatattatttagataaacaatttgagggtcatgggattatgacacaagcagttgaggcattgataaagtattgtttcgaagagcttgacttaaaccgaattgagattagtgccgcagttaataatgaaaaaagccgagctattcctgaaaggctgggatttactagagaaggtatgttacgtgacaatgaattactaaatggtatttattcatcgagttacatctatagtttattaaaatcagaatacgaccaaaaatgacaaattagacttacaaaagagtgatgacatttaaaatggcatcgctctttcatttaattttttaaaataaaaggttgttgacagtattattttataacaatataatgattttgataattattatcaactagataatgttcatgggaggatgccttaaaatcatcattttaagagccacgtattatcttggcatttagggagtgtgagatagtacgaatgagggcatgtctatggggataatagaatttctataatgaggtgtcaaaatgaaaaagttaacaacgctattattagcatcaacgttattaattgctgcatgtgggaacgacgatagtaagaaggatgattcaaagacatcgaaaaaagatgatggtgttaaagcagaattaaaacaagcaacaaaagcatatgataaatatactgatgaacagttaaatgaatttttaaaaggtacagaaaaatttgttaaagcgattgaaaataatgatatggcccaagcaaaagcgttatatccaaaagttcgtatgtattatgaacgctctgaaccagttgcagaagcatttggagatttagatcctaaaattgatgcacgtcttgcagatatgaaagaagagaaaaaagaaaaagaatggtcaggatatcataagattgaaaaagcattatacgaagataagaaaattgatgatgtgactaaaaaagatgcacaacaattattgaaagatgcaaaagaattgcatgccaaagctgatacattagatatcacaccaaaattaatgttacaaggttctgttgacctattaaatgaagttgcaacttctaaaatcacaggtgaagaagaaatttattcacatacagatttatatgattttaaagcgaacattgaaggtgcacaaaaaatttatgacttatttaaacctattttagagaaaaaagataaaaaattaagtgatgatattcaaatgaacttcgataaagtgaatcaattattggataaatataaagataacaacggcggttatgagtcatttgaaaaagtatctaagaaagaccgtaaagcatttgcggatgctgttaatgcattaggagagccactaagtaaaatggctgtgattactgaatgacaaattatgaacaagttaacgatagtacgcaattttcaagacgtacatttttgaaaatgttaggtattggcggtgccggtgttgcaattggcgcaagtggtgttggtagcatgtggtctttcaaatcaatgttcaatacaccagaagatccggaaaaagatgcgtatgaattttatggtaaagtgcaaccaggcattaccacacccacgcaaaaaacatgcaatttcgttgcgttagatttgaagtcaaaagatagagatgcaattaaggcaatgtttaaaaagtggacggttatggctgatcgtatgatggatggtgataaagttggcaagccgagtaacaatcctttaatgccaccagtagataccggtgaatcgataggattaggtgcaagcaagttaacgattacctttgggattagtaagtctttgatgaagaaaattgggttatctagtaaaattcccgatgcctttaaagatttaccgcattttccgaatgatcagttaatagacgattacagcgatggtgatattatgattcaagcatgctcaaatgattcgcaagtatcctttcatgcggttcataatttagttcgtccatttcgagatattgttaaggtacgttgggcgcaatctggttttatctctgctaaaggtaaggaaacatctagaaatttaatggcatttaaagatggaacaattaatcctagaaagagtaatcaacttaaagattatgtgtttattgatgacggatgggcgaaacatggaacttattgtgttgtcagacgtattcaaatacacattgaaacgtgggatcgtactgcactggaagaacaagaggctacatttggtcggaaacgacatagtggtgcgccgttaacaggtgggaaagagtttgatgaaattgacttaaaagcgaaagatagtcatggcgagtatattattgataaagatgcccatacgagactagcgaaagaagcaaatacgtcaattttacgtagagcctttaattatgttgatggtacggatgaccgcacaggtaacttcgaaacaggcttgttgttcattgcttttcaaaaagcgacaaaacaatttatcgatatacaaaataatttaggtagtaatgataaattaaatgaatatattacacatagaggttctgcttcatttttagtattaccaggtgttagtaagggaggataccttggtgaaacattatttgattaaatttgtagcaatgctaataactgctgctatggtgtgtagctttgggttactgaaaagtcaggcagcaaaacaacaaagtattagtgatgtatatagtgtgataacggatgcgaaatctgcactttctaataattcgatatcgaatgacaataagcagaaagcaattgagcaagtggtaagtgcagttaagaaattatcgcttgaagataatagcgaaggtaatgctgtcaaatcagatgtgagaaagcttgaagatgcaaaagcgaatgataatcaaaaagatacactttcgcaattaacgaagtcattaattgcttatgaagagaaattggctagtaaagatgcgggttctaaaattaaactattgcaacagcaagtcgatgccaaagatgcagtaatgacaaaagcgattaaagataaaaataaagcagagctagaatcgctgaacaatagtttgaatcagatttggacaagtaatgaaacggtaattcgcaattatgacgcaaatcaatatggacaaattgaagtcgcattactgcaacttagaatcgcaattcataagtcgccattagatacagcgaaagtgtcacatgcttggacaacttttaaatcaaatattgatcatgtcgataagaaaagtgatacgtctgcaaaagatcaataccatgtatcacaattaaatgatgagttagagaaggcgattaaagctatcgacgacaatcaattgtcggatgctgatgctgcgcttacacattttatagaaatttggccgtatgttgaaggtcaaattcaaactaaagacggtgctttgtatacgaaaattgaagataaaataccatattatcaaagtgtattagacgaacataataaagcacatgtgaaagatggtttagtagatttaaataaccaaattaaagaggttgttggccatagttatagctttgttgatgtgatgattatctttttacgtgaaggtctagaagtgttattaattgtaatgacattgactactatgacgcgtaatgtcaaagataagaagggtactgcaagtgtgattggtggtgcaattgccggacttgtactgagtattatcttagcaattacgtttgtagaaactttaggtaatagtggcattcttcgtgaaagtatggaagcgggattaggtattgttgcggtcatattaatgtttatcgttggtgtttggatgcacaaacgttcaaatgcgaaacgctggaatgatatgattaaaaatatgtatgccaatgcgattagtaatggtaatttggtattgttagcgacgattggtttaatatctgtgttgcgtgaaggtgttgaggttatcattttctatatggggatgataggtgagctagcgacaaaagattttattattggtattgctttagctatcgttatattaattatctttgcgttattatttagatttatcgtcagattgatacctatattctatatatttagagtgttgtcgatttttatttttattatgggattcaaaatgcttggcgtaagtattcaaaagttacaattattaggtgctatgccgagacatgtcattgaaggattcccaacgattaactggttaggattctatccaacttatgaaccattgatagcacaagctgcctatattatggtagttgctatcttaatctttaaatttaaaaaataaaaaacaggccgagtgcctgtttttttgttgcgatgttggaaatattcggtattgcagtataacgataatcacagcattaattcttataagattaatgtgttggcggtttgcctcggtatgtaaatttaacgatgaacgtactgaactcaaagagcaatatgagtggcaatgtgagtaatatatttaatgttaaatcgggtggtgcaatgatacttgctaatacaaagcaagcgaaataaatatattttcgataatgcttcaatgatgtggtatctataagaccgaattttgcaagtcctatgaataatattggtaattgaaatagaatgccaaatgtgaataaccaacgtataagttcaatcaaatatgctttaaagccaatgacaggcgaaatgtttaaagttaatgataattttaacgcgaattgaatgatcattggaaagccaacataaaatgcaaaagcgacaccaaaaataaataaaagtacgctaaaaaagctatatttataaataaattggcgctcattattatgcaaaccaggcgcaacaaacgcccacaattgataaaacataaccggtgaaatgagacaaaacgcgatgaaaaatataatcatcacgtatatttggatcatttctgtgaatgaaaatgcatgtaaggacacatgtgcacgggtaatatacgttatgaatggtgtcatccaccaaaatgatgaaacatatacgacgatgaccgtaatgacgaacgacaataaaatttttactaaccgatggcgtagttcgctaaagtgaaccattaatgtatcatcagtactattgctctcgctgttgcttcgattccttactgggtgtatcgtgagactctttatctaaatcttctgttgcagatttaaattcttttaaagtagaaccgatagcacgaccaaattgtggtaattttttcggaccaaaaataattaaagcgataatgctaatgacgacaagacttgttggacctgtgatgcctaaaataaaagtgttagttatcatgataatcaacctcactcataagtagtatatagtatttactttataccgaacgataatgattatcaacaaattttatataataattaaaatattgctataaacacaacttattgagggattaattctgaaataacagcttggtcttgcaagtcgatataagtacaagtgcccgcttgaatatcgatatgccatttataaatgccagcttcagccatttcatcacaaaatgtttcaaaatctgtttgtccttgttgatgtctagttaatacatcttgaacgatagattgatttgatttttgagcaacaggaatcgtacttttcacagatgacgtaacgatatcatcttctgattgatgtacgtatgttgcagtgccatcttgaatgttgacgatattgtaagtcatccccatatctttaaaagctttgaatagttttggaaaatcaacaccagtaaattgttgatgtgcttgttgaattgcagataatgtaaatgccataatagtctcctttgaatcgtttgatttagtgaaaatgcgtgcatcatactaaaattagaatgctgttaattatgcgggaaggtgtaacgaaagtaaacaattatgacttgtaggcgttgaggtgtttgtttcaaaatgtcatacatagctggataatcatattttttgtacatatttgacaaatatagttgtcaaaaagacaaatatcatttacagtgtaattaaggagttgatgcgatgtgcgtaatcgattgaaagaattacgagcacgagatggcttaaaccaaacgcagcttgccaaactagcgggtgtttcaagacaaaccatttcgctaattgagcgaaataactttatgccatcggtattaactgcaataaagattgctcgtatcttcaatgaaacggtggaaactgtttttattattgaggaggatgaggtatgaaaatactaagatatatcggatatcttttactaggtggacttgtagggggtatcattggtggaattttaggtaattttgatggattgggtattgagaacttgacgtttgcgacatataccaatgtcgttgtaatatcgattgttgcgacgattattatcatattggtagaagccattgttttgatgaatcaaagacgtgcattgaagtataagcgacttgtagatgaagaggtagatatcgatgcaacagatcaatatgaattgcttgcgaatcgttatgttttaaatggaagtatattaagcgttatacagacaattattgcctttgtagtgttactaatttttgtggtagggcaagctgaagcaaatgcaatgctattctttttaataccattttttgctagtgctattttcaatacacaatttacactgtttaatagaaaatttgatgacagaatgccaaaaattgcagataagaattacactgaaaagcgattggaaatattggatgaaggtgaacgccatatagaattaattgcattatttaaaacatatgcgatcaacttatcaatattgatactagccattatttttatagggtcttattcaattgctacaggaattaatcaaagctttagtttgctacttatcattgctattttcatatataacgcctttagctatttattgaagagaagacgtttttattaaaattaaacaaagaggagcatggatatgacaacattgttaaacgtagatcgtgtgaacaaacaatacaaagattcggattttaaattgcaagatgcatctttaacgatttctactaatgagacagttggattaattgggaaaaatggctcaggtaaatcgacattaattaatattctagtaggcaatcgacataaagataacggtagtattgcattttttggagaagaacatgctgcggatgatgtcgaatataaagaacacataggtgttgtgtttgatgatctgagagtacctaataaattgactattaaagatattgataaagtatttcaatctatttatacgacttggaatagtcaaaaattctttgatttaatcaaatatttcgagttaccacgacaaactaaaattaaaactttttcaagagggatgcgaatgaagatagctttaacgattgcgctttctcatgatgtgaagctattaatcttagatgaagcaactgcaggtatggatgtttctggacgagaagaagtaatggaactattagaagattttgtcgctcaaggtggaggcatcttaatatcatcgcatatttctgaagatatagaacaattagcggataaattagtgtttatgaaagatggacgaatgattttaactgaacagaaagatatacttttagcacaatatggaattgttacgacaggagataaagatgttgaaattactaagcatttaatcattgcttctagattgtcaaaggggaaatatcaaattttagttaaagattatgcagaaattgaaaatgcagagcctttaaaacacattgatgacgctacgaaaatcataatgcgaggtgaagtataatgaaaggtatgttcctaagtagtttttatgcaacgagaaagcaaacatatatttattttatagtcgctatcatagctgcgggatactttgcagtatttaatccgttgatgagttcggcaatggctggggttatgttaatcacacccattactgataatattaaacatgaaaaagactcaagatggatgtattatgtatctactttaccggttaaacgtagtgattatattaagtcatactttgccttttatttaatcttattcggtgcaagtttaatgattggattagttgtgactacgatcgtgacccaaagtgtgatgattggtattatgtcaggtttaatgagttttggtatcataggggcatactctatcattttcccattgacatttaaatttggcgctgaaaactctaatgtcattatgatagttgcatctatcctactacttttttctttcgtggtctttttctttatatatggtatggttagcggtgcatcggcattagaatttgaaaaaattagcactgaaggatggttagttgtcatagtatatgcggtcattggtatcgttataacaagtgtttcttatatattgtctattaaaatttttaacaaacaagaactataatcaatattcttggtgtgaagctagtcattgaaataatatttagagcaggtgataaatcaatacgattatcatctgctctttttggtgttgtggaatgaaatgcgggatgataggttgaggtgacatctctatatcatatcatttgtttttagaagattaggttgtgtgggaattgcatccttttatagtgaggattaacgtgtatatatcattgagtatgttgctgaaatttatttgcgtgtatcaattgatgatggtatatgccaatgatttcctcggaaatataaaaactcgatcatgtatcataactgatgattgtcacaaaagtataatgtgaagttcgacacttttggattcagttcaaatactttgaccgaggtgaatactatttattcatgtttattacgtagacgttgatttttaaaataaatcagcatgatgcagaaagtcgcaacggataccgagataatcattacttggtcatgccccttaaagataaggctgatgatatatgatactacaagtatgcctagtgaagaagaaatatattttgcgtttgtcagttcattatggaaataaggcgtgattaaccataatccaatatagaatattaaaacactgatatacatcatattaatttcaaacaagtcatttagtttattgttattactaaaaacaattgcagcattaatcacacctaaagcgatattgattaatagatgcgtatacgataaacggaaaccgatagatgacaatttatgattaatgtaattttcagtaatgatccaatatacaccgaaaagactaattaaaatcataaattggaatatataaatgtaactaaaatgatcaatgctaaatgatgacgaagctaaaccaaccagtacctcgccaaagataataattgttagtaacgaaaaacgttctactaaatgcatcatattaacaggtgataatacaagatatttctgaaatggaataagtcctgtcgctgcaatgaatacgcctaaaaatccagggatgtaatggatactttgtggtagtactaatgatagaaatgataaaaatgaaatcacaaaggctacgctcgcaaaagcttgacatgtacgcttatcgccataatctaaccctgtacgtatatgtaataaatactgtaatccgatacttaaatacataattgccacgcataagaagaatgggaagaatgtcttttcaaagtccggatataggctgttagataggaagaccatgatgaacatattaaacatcataaacgagacgtctttgaatgtaacttgaccaaatcgatttgtaaaaaatgtttgatgagaccacattaaccataagaacaaactcatgacgatgtatttgaaaaataaatcagctgaaatggaaccgttttgtgttgttaaaatcacatgtgcaattttttgaatggcatagacgaaaattaaatcaaagaacaactcatggaatcctgcacgcttttcagctaaatgttttggtgttaatgcattaaccataaaattttaactcctttaagatgtgtaattaatttactaagtatactatttattttttctagtgaataggggcagatttggcgatgaagtggaaggagaggtgactgcatggtaattgcggaattaacaatcatcagcgatttaatatttgactagagacgtaatggtaataaaaaattgatgagaaattgatggtgaaaccagctgtgaatagcgatgcaatgatagatagaatttaattagagtcattacgcgaaatgattaatgataatttgtggtaaatcaaagcataattttgtactatagatgaggatgatagagcatatttaagagtgtgaaatgttaaagtgaaaccgtttacgtttccgattgcccaaacaaattacatcattgtataatatgatttgttaaatgcataacaagaatgaaaatgtaacatacgtagcaattggtttcataaattggatgttagtggcgtattggttcattagacgtattagtaataaaattgtatatatcataaggagatgaatatgacatgacgagagtcgtattagcagcagcatacaggacacctattggcgtttttggaggtgcgtttaaagacgtgccagcctatgatttaggtgcgactttaatagaacatattattaaagagacgggtttgaatccaagtgagattgatgaagttatcatcggtaacgtactacaagcaggacaaggacaaaatccagcacgaattgctgctatgaaaggtggcttgccagaaacagtacctgcatttacagtgaataaagtatgtggttctgggttaaagtcgattcaattagcatatcaatctattgtgactggtgaaaatgacatcgtgctagctggcggtatggagaatatgtctcagtcaccaatgcttgtcaacaacagtcgcttcggttttaaaatgggacatcaatcaatggttgatagcatggtatatgatggtttaacagatgtatttaatcaatatcatatgggtattactgctgaaaatttagtggagcaatatggtatttcaagagaagaacaagatacatttgctgtaaactcacaacaaaaagcagtacgtgcacagcaaaatggtgaatttgatagtgaaatagttccagtatcgattcctcaacgtaaaggtgaaccaatcttagtcactaaggatgaaggtgtacgtgaaaatgtatcagtcgaaaaattaagtcgcttaagaccagctttcaaaaaagacgggacagttacagcaggtaatgcatcaggaatcaatgatggtgctgcgatgatgttagtcatgtcagaagacaaagctaaagaattaaatatcgaaccattggcagtgcttgatggctttggaagtcatggtgtagatccttctattatgggtattgcaccagttggcgctgtagaaaaggctttgaaacgtagtaaaaaagaattaagcgatattgatgtatttgaattaaatgaagcatttgcagcacaatcattagctgttgatcgtgaattaaaattacctcctgaaaaggtgaatgttaaaggtggcgctattgcattaggacaccctattggtgcatctggtgctagagttttagtgacattattgcatcaactgaatgatgaagttgaaactggtttaacatcattgtgtattggtggcggtcaagctatcgctgcagttgtatcaaagtataaataataagaaaacaggttatcacaacagtattaattacatgttggcataacctgtttttatttgtttatggatttattgggtaatattagtcatttgatggtttaattgcaaatgctctaacagggaacccaggtgcatcttttggtttagggctgatagcgtaaatgatggcgccacgagttggtaattgatctaaattagttaataactcgacttggtatttatcctgaccaagaatataacgttcgccaactaaatcaccattttttacaacgtccacagatgcatcggtatcgaatgtttcatgaccaacagcttcaacacgacgttcttcaattaagtacttcaaagcatctaatccccaacccggtgcatgttgttgtccgttcgcatctttgttttcaaacttttcaatattaggccaacgttttgaccaatcggtacgaagtgcaacaaaagtgccaggttcaatagtaccatgctctttttcccatgcttctatatgcgcacgtgttacaatgaaatcattgttgttcgctacttctgttgaaaagtctaatacaattaacggcaataccaattcttttaaatcaatgtcttctaaataacgtttattctcgacaaagtgaattggtgcatcaatgtgagtaccatattgcgttacaatattccaacgttgcacatagaaaccatgatctttaaccgtgaataaagttgaaacttcgcctttttcaaactcactaaaacgtggtatttccggatcaaatgtatgcgttaaatcaacccaagttgcttgttttaaagtatttaattgttgccataaaggatattgtgtcataaaatcacccgtttttagtttattatatgataaatgctgcgattattcttggcgtttagctttaacagcattcacaagcacagtcaatgcatctttaacttcttcttcttttcgcgttttcaaaccacagtcagggtttacccagaataatgagcggtcgatttgttgtagtgaacgattgattgctgtagtaatttcttcttttgttggaatacgtggactatgaatatcatacacacctagaccaatacctaaatcataattaatatcttcaaagtctttaattaaatcaccatggctacgagatgtttcaattgaaataacatcagcatctaagtcatgaatagcatgaatgatttgaccgaattgagaataacacatatgtgtatggatttgagtttcatcacgaactgaagacgttgcaagtttaaatgataaaacagcatctttaagatattgttcgtgatattcagagcgtaatggtaagccttcacgtaatgcaggttcgtcaacttggataactttgattcctgcagcttcaagtgctaatacttcttcgttgattgctaaagcaatttgatcttgaacgactttacgtggtaaatcaacacgttcaaatgaccagtttagaattgttacaggtccagttaacatacctttaactggtttatctgttaagctttgtgcataaactgtttcatcaacagttaaaggcgctgtccattttacatcaccataaatgattggtggttttacggcacgtgaaccatatgattgcacccaaccgaatttagttactaagaaaccttgtaatttttctccgaagaattcaaccatgtcattacgttcaaattcaccgtgaactaatacatctaagccaatgtcttcttgaattttaatccatcgagcaatttcattttttaagaatgtttcatatgcttcgtctgtaatgcgtttgttcttccaatctgcacggtattttcgaacttctcggctttgtgggaatgatccaatagttgttgttggtaaatccggtaagttcaaacgtttttgttgttgttcaatacgttgcgcgaatggtgattgtcttgaagtacgcacgctttcgaaatcataatctaagtttttgaatgattgattttggaaacgctcataacgtgcttttaatttatcatatttaacactatcgttttgattaaataggcgacgcaatgcatctaattcgtctaatttttcagttgcaaagcttaagccttcgccaacacttgtatctaatgtttcatcatctaaagatactggaacatgtaataatgaagatgatggttgaatgacaagttcattagtgtgtgctaacaatttatcgattaagacttttttagcttcaatgtcacttgcccacacattacgaccatcaataattccagcgtataatgtttttgatttatcaaaatctccagcttcaatttgtttaaggttatagccattatcatggacaaagtctaaacctaaaccaccaacaggtaaagaacttaagaatttaagatgtgcacgttcaaagtatgtttgaatgactaattttttagcaacaccagctttttcgaaatagtcataagcttcacgtgtaatattttcatagctttcgctgtcgtctgtaactaagattggctcatcaacttgaatgtactcagcacctgcatcaattaatgattcaaacacttctttataaagtggtaataacgttttaactttttcttcaaaagtttggtgaccgccttttgataatttaacaaaagtaatcggaccaacaatgacagggtgagcgttaacgtttaaagattgggcgtatttaaagcgatctaataatacattgcgactcactttaggctcaacattgtcccattcaggtacgatgtaatgatagttagtgttaaaccattttataagtgcacttgcaacatggtctttattaccgcgagcaatatcaaataataagtcatcatcgatagttctaccttggaaacgttctgggatgatgttgaataataatgacgtatctaaaatatggtcatataaagagaaatcaccaactgggatgctatctaagtgatagtacttttgtaataataaattttctttatgtagatcagttaatgtttgatctaattcttctttagaaatcttttttgcccaataactttcgatggcttttttccattctctttttctacctaatcttgggaatcctaagtttgatgttttaattgttgtcataatattgcctccttgtgagcagtaatagattttgagtatgctgcaagttctaatgaatcttcgacattttgaaacggtgtgataatgtataaaccattaaaatattcatgaacagtatcgattaaatcctttgaaagcttaagacttagctctcgtgttttggcgttatcatctttaactgcttcaaattgttgtaaaatttcatctgacatcttgattcctggcacttcattatgcaaaaagagtgcgtttttgtaacttgcgataggcataatgcctatgaaaaatggtttgttcaagtgcttagtggcatggtaaatttcaatgattttctctttgctgtacacgggttgtgttataaaataagacattccgctttctatctttttctctaatcttttgacggcaccatctaattttcgaacattaggattaaaggcgccagcgatgttgaagtgtgtacgtttcttcagcgcatcaccgtcagtgttaataccttgattaaatcttagagcgagttcagttaatcctttagaattaacatcatagacattggttgcacctggtaagtgaccaacttttgaaggatcaccagttatggctaatatttcgttaacgccaatgagcgataatccaagtaaatgggactgcaagccgattaagtttcggtctcgacatgtaatatgtacgagtggttcaatattgtaatattgtttaattaagcttgcagcagcaatgttgctaattctgacagttgccaatgaattatctgcgagtgttaccgcatctacattagctttgtcaagtttagcgatattttcaaaaaatctatccgtgtctaaatgtttcggtgtatccaattcgataataacggttggacgttcttgaaccttagatgttaatgattgtctaactttattttgagatggattgaaaagtgctttcgttggtatcggaatcacttttttgtcattaacaggtttaagtgtctgaatagattctttaataaatttgatgtgctctggcgttgtaccacagcaaccaccaattaaacgaacaccttcgtgaattaaattttgagcaacttggccgaaatattgtgcattgtcactatacttaaattcactattttcaatatctaataagctggcatttggatagcaagataagtatgcgtgctctggtaattcaatatgtgtgaaagactcttgcatatggtgcgggccatgatgacaattgagtcccacgatgttggcaccacattgaacgagttgttttaatccttcattgattgcctgaccattaactaagtaatttgtgtttgaagcggttaattgagcaatgattggaatgtcgtatttctttctcgttcgtgaaatgacatttgttaactcttctaggtcgtaatacgtttcgaaaagtagcgcgtcaacgccttcttcaattaaggtgtctatttgaatttcagtatgataaagaatagtttgtaagctgatatcctcttgtttgatacctctaaacccaccaactgtgcctaatatatacgtatctttatttgctgctttttttgcgatgcgtacggcggcttgatgtatagctttaactttatcttcaagaccgaatcgttttaacttttcaaaatttgcaccataagtattggtttgaatgacatcagcaccagcttcgatatatgaacgatggatacgttcaactttatctggatggctaagattatatgcttctggacaggtgtctaatccttcagagtataaaatggttccaatagcgccatcagctactaaaacattatctttcaattgtgtgaggaattgactcattgaatgcctcctttaatgcgtatttgatgtctgcaatgagttcatcaggatcttcgagaccaacacttaatcggaatagaccgaaagtgataccacgttcttgtctcacttcttcaggtagtgcagcgtgagacattgttgctggatgtgaaaggatcgtttcaacaccgcccagactcactgaaacgagtggtaatgtcagtgcatcgacaaattgttgtgctttagactcatcagctaaacgaaagccaataacggcaccgccatttttagcttgttctaaatgagcagtagtgagtcccggataataaacttctgaaatttcatcttgctttattaaaaatgacacgattttttgcgcgttttcgacagattgtttaaatctgattggaaatgtttttaaatgtttagcaagtgtccagctatcttgagcagataacatattgcctgtaccattttgtattaaataaagagcttcactaattgcctcattattagtaatgacagcaccagcaattaaatcgctatgtccacttaaaaattttgtagcactatgaatgacaatatcagcgccaagtaataaaggtgattggcctaacggtgtcataaatgtattgtccacagctaccagtagttcatgcttttcggctattttagaaacagctttgatatcagtaattttaaaacagggattcgatggtgtttcgatataaattaattttgtgtttgattgaatggcaccctcgatttgttcgagcttggtagtatctacggttgtaaattcaatattaaatcgattcaaaatttgctcagtgaggcgaaaagtaccgccatatacatcatcgggtaagatgacatgatcaccagatttgaaagtcaaaagtactgctgaaatagcagcaatacctgatgcaaaagcaaaagcgaattttccctgttctaatcgtgctaacttctcttctaaaagttcacggttagggttgccacttcgtgcataatcatatttaacatcgccaccaagacttgtttgatggaatgttgaagaatcatagagtggtgggttagctgaatgatattccacacctctacgccaatcgaatatcacttctgtctcttttgaaagtgtcatacaatctctccaatctgagctttatctaatgcttggatgatatcgcgttcgatgtcttcataattttcaacacctagtgataagcggattaaatactcatcaatgccacgtttatctttttcagcatctggcatatcaacatgtgtttgggtgtaagggaaggtcactaatgtttcagtacctcctaaactttctgcaaaaatgcaaatgtctaaattttctaataatttagcgacgctataggccttgttaagtcttaaactaagcatgccagtttgcccgctatatagtacttcgtcaattgcttgaagtgactgacattttttagcaagttttctagcgtttgattgcgcacgctcaatgcgtaaatgcaaagttttaagtccacgtaacaacaaataactatctattggtgaaagtgttgcgccagtcatgttgtgaaaatcaaacaactgttgcgcgagtgattcatctttgacggttacgacacctgctagtacatcgttatgtccgccaatatatttcgtggctgaatgtaagactatatcagcaccttctgctagtggtgttgaaagataaggtgttaaaaaagtattgtcgataattgacaataagcctttagctttacaaagttgatagtatggctttacatcaatagcaatcatttgtgggttagatattggttcaatgaataatgcaactgttttatcagtgatttctttttcaacttgttcataatctgtaaaatcaacgtacttaaatttgatattgtattgttgctcataaaattcaaataatctaaatgtgccgccgtataaatcgaatgaaactaaaatttcatcgtgtggtttaaataaattacatattaattgaatggctgacattccacttgatgtagcgaatgatgcaataccatgttcgagtttggcaaaacaggtttcaaatgttgagcgtgtaggatttttagtacgtgtataatcaaaacctgtcgattgtcctagttttggatgcttgtaggcagtagataaatggattggattcgctatagcaccggttgaatcatcggttaatgtgatttgggctaactgtgtatccttcatattaagaccctcctataagaaaaaataaaaaaagcttccgtccttcgtacccgaatgaatcggataaaaaggacgaaagcttatgtttcgcggtaccacctttatttgttattccatcgctgaaataaccttattcagtacgcattaaaagtaaatatgcttactgaacaattatcacaattaaagtcagtaagtaaggatatagtaatgtgctatcccatacttattaacaaaaaatcgtgcgtaaagaatccagtacgccatttaacatcaatgttaatactgtatcgctataacgggcgaacccgtagacacctcatattggcatcaacactccaaggccattttcaaacacgctttcaaaatcttctctcagctactaaagactctctgtataagcagggtgtgttttactttcctctttattgtgtttacgtttcattaaactgttataagatattaattagcttacagagtaaaaaaagatttgtcaacaattattcagaaaattttgatttaaaagttaatttgtttgtgaaattgtaattggtatcttgaagttgaaaaatgaattattttttaaataaagtgtggttaatggttgtctgactcatttagaatacataaaatatatttaactgttgttatcaaataaaaagtgatgtgagtgaattgtcaaaaagtgaagatcaacgtattactaaaacaaaagatgaacaaattaagcaaatagatatatcggatatcaaaccgaatccgtatcagccccgaaaaactttcgatgaaaatcatttaaatgatttggcagattcaattaagcaatatggaattttgcaaccaattgtgcttagaaaaacagttcaaggttattacattgtagttggtgaaagaaggtttagagcttcgaaaattgctggtctaaaatacgtatcagcgattatcaaagatttaacagatgaagatatgatggaactggcggtcatcgaaaatttacaacgagaagacttaaatgcgattgaagaagctgaaagttatcaacgtttgatgacagatttgaaaattacacaacaagaagtagcgaagcgattgagtaagtcgcgcccgtatatagcgaatatgttgaggttattacatttgccgaaaaagattgctgacatggtaaaagatgggcgactgacaagtgcacatggacgaacgttattggcaattaaagatgaacaacaaatgcttaggttagcgaaacgggttgttaaagaaaagtggagtgttagatatttagaaaaccatgttaatgaattaaaaaatgtttcgtcaaagtcggaaacagacaaagtagatataactaagcctaaatttataaagcaacaagaacgacagttgcgagaacagtatggtaccaaagtagatatatcaataaaaaaatcggttggtaaaatctcatttgagtttgattcacaagaagattttctaagaataattgaacaattaaatcgtaggtatggtaaatagttacacaattttatataataactctttgtgcaagtgtaaataaattgtaatcagtgaacatttgattctagatatattgagactttcgtaggttggaagtatataaaaatatgaatacaatattgatatatcatatagaagggagtaacgcttatcatgaatcaagtcatgaatattatttcatctctatttgagccattaacaaaaatagaaacatatgaaaacattgcaactaaaatcgctatgattgttatttatattatcgtagccctcatagttattaaaatactgaataaaatgattgaacagggatttaagattcaaaataagagtaaaaagagtaacaaaaagcgctctaaaactttaatatctcttgttcaaaatgtagtgaagtatatcgtttggtttatagttattacgacgattttaagtaaatttggcattagtgttgaaggtgttattgcaagtgctggtgtcgtaggtttagcagtaggttttggtgctcaaaccattgttaaagacgttattactggatttttcattatatttgaaagtcaatttgatgtaggtgattatgttaaaataaacaatggtggtacgactgtggcagagggaacggttaaatcaataggacttcgttcaacacgaatcaatacaatttcaggagaattaacaattttaccaaatagtagtatgggtgaaataacgaactactcaattacaaatggtacagctatcgttaaaattccagtgtctgtcgaagaaaacattgataatgttgataaaaaactaaacaaactatttacttctttacgtagtaaatattacttatttgttagtgatccggttgttattggtattgatgctattgaagatacaagagtaatattgagaatatctgcagaaacaattccaggtgaaggatttgctggagctcgaattattcgcaaagaagtacaaaaaatgtttttacaagaaggtattaaaacacctcaaccaattatgactgcttataatcatagtgaaaacggtgtttagtagtttataatacatggaggtcatatttaatggcgtcaaaatatggaataaatgatatagtagaaatgaaaaaacaacatgcgtgtggaacaaaccgttttaagattattagaatgggtgcagacataagaattaaatgtgaaaattgtcaaagaagtattatgattccacgtcaaacgtttgataaaaaacttaaaaaaatcatcgaatctcatgatgatacacaaagataggagaatgattaatggctttaacagcaggtatcgttggattgccaaacgttggtaaatcaacattatttaatgcaataacaaaagcaggtgctttagcagcgaactatccattcgctacgattgatcctaatgtagggatagtagaagtgccagatgctagattacttaaattagaagaaatggttcaacctaaaaagacattgccgactacatttgaatttacagatatcgctggtattgtgaaaggtgcttcaaagggagaagggttaggtaataaattcttatcacatattagagaagtagatgcgatttgtcaggtcgttcgtgcatttgatgatgataacgtaactcatgttgctggtcgagtagaccctattgatgatattgaagttattaatatggaattagtactagcggacttagaatctgttgagaaacgtttgcctagaattgaaaaattagcacgtcaaaaagataagactgctgaaatggaagtacgtattttaacaactattaaagaagctttagaaaatggtaaacccgctcgtagtattgactttaatgaagaagatcaaaaatgggtgaatcaagcgcaattactgacttctaaaaaaatgctttatatcgctaatgttggtgaagatgaaattggtgatgatgataatgataaagtaaaagcgattcgtgaatatgcagcgcaagaagactctgaagtgattgttattagtgcaaaaattgaagaagaaattgctacattagatgatgaagataaagaaatgttcttagaagatttaggtatcgaagaaccaggattagatcgattaattagaacaacttatgaattattaggattatcaacatattttactgctggtgtgcaagaagtacgtgcttggacatttaaacaaggtatgactgcacctcaatgtgctggtatcattcatactgattttgaacgtggatttatccgtgccgaagtaacaagttatgacgactatgtacaatatggtggcgaaagtggcgctaaagaagcgggcagacaacgattagaaggtaaagaatatattatgcaagatggtgatatcgttcatttcagatttaatgtataaacgatagagtgaagttaattaaatagtatatatggagaagaggcggaatcaattgttcgcctcttttaattatgcgtataatttattaaaagaatggaataattttactcgcgttaataatatcttgagtgctgaaaaattgtttgccttcgccagtataagcaggctctaaaacaagattagcctttgcacaataaagccattcaggatgaatgccactattaagtatctcttggaattcttgaaaatctttagaccaatcaatatttaaattcattccttaccacctcacaactattatagaacacgtgttcgcttttgtgaagtgtatttttaaaaatatcatagaaaatttcaaatgaattaatgtcaaaaatgatatgaagagtagtttgaattattattgtaaaaagtaatggcgcatgatataattctttattgtgagtaatgaaaattattccttgcttatctgttttaagattgataagccgtatagaccacaaggaggtgcaaatataaaatgagaacatatgaagttatgtacatcgtacgcccaaacattgaggaagatgctaaaaaagcgttagttgaacgtttcaacggcatcttagctactgaaggtgcagaagttttagaagcaaaagactggggtaaacgtcgcctagcttatgaaatcaatgatttcaaagatggcttctacaacatcgtacgtgttaaatctgataacaacaaagctactgacgaattccaacgtctagctaaaatcagtgacgatatcattcgttacatggttattcgtgaagacgaagacaagtaataattagagggggcgtttaaatgctaaatagagttgtattagtaggtcgtttaacgaaagatccggaatacagaaccactccctcaggtgtgagtgtagcgacattcactcttgcagtaaatcgtacgttcacgaatgctcaaggggagcgcgaagcagattttattaactgtgttgtttttagaagacaagcagataatgtaaataactatttatctaaaggtagtttagctggtgtagatggtcgcttacaatcccgtaattatgaaaatcaagaaggtcgtcgtgtgtttgttactgaagttgtgtgtgatagtgttcaattccttgaacctaaaaatgcgcaacaaaatggtggccaacgtcaacaaaatgaattccaagattacggtcaaggattcggtggtcaacaatcaggacaaaacaattcgtacaataattcatcaaacacgaaacaatctgataatccatttgcaaatgcaaacggaccgattgatataagtgatgatgacttaccattctaataaaaattaacgaaattaaagcgaaaaaattatcaaaggaggcacacaatcatggcaggtggaccaagaagaggcggacgtcgtcgtaaaaaagtatgctatttcacagcaaatggtattacacatatcgactacaaagacactgaattattaaaacgttttatctcagaacgcggtaaaattttaccacgtcgtgtaactggtacttcagctaaatatcaacgtatgttgactacagctatcaaacgttctcgtcatatggcattattaccatatgttaaagaagaacaataatatataatttattgtcaaaccccgtaggcataggcttacggggctttttgtgttttggggtatagaaaaagggcaaaaaaggatgatgtgaatgttttgtgttcggaatttgcacaaagatatgtttatattgcaaaaataatatgaatttagatgcataaaaaaagaactacgcattttaaataaaatgcatagctcttctttttcttgcatacgaattaaaataactcgcgagacctataagtctctttcctcactagatagtttatacttttggtctgttgaagtcaataattttatctaaagctataaaaaatcttttgatagctaatgcattattataatagctttcgtttcttttatatcgcttttgaagttggtccaaatcgtgatatcttgcttggataattgcattactacaaacttgattatgtaattctagcgtagcgaaagtatctatgaaattttttattccgaacatgtttctagatatgcctatattattccctttttcaaataaatattgaggagatctactgtcataatttagatttgctatgatgggttggttatgagctgatttgtttcttatatttttaactaaaggcattaaaatattagcaactctcaattcttcgtcattgtacttcttgtaatagaagttgagaaacgaaacgaattgacctagttgcatgaattcaatgcaaacccatgcgggtggattttgatagtatttattcaacttctcgggtagttgtcctcgtttattcatatgcttgaatatttcgtttttatttttgattttggtttccataacttcttctggtgttcttgaatttgtgtcaaaatttgaattgctatatgatttatcaatacataagaactcatctattattttataaccatcttcttggttattttctgttattagttttaagactagacactttaaactatgttcaatatctaaagttaaatgcaacattgtgtatcttaatttcatatctatagttgctaaatctgataaataagcaaattctatgaaatagccgccattctttttttcgaaattttttcggaaataagctagtttgaagaagtgattattttttctaagaatttcatttgctttttcggtgtcaataatattaaaaaatatattcatctgttttaatttcgctatttgctcatcaaaattgagcataggcttaatttctgctagtgtatcatctttttccaattttaactccccaatcattcaaatttattcatcatatctttcgccatctgattagtaacatgtgtgtatatctctagatttttttataatctgaatgacctacatgctcttgcattgcttttaagttaattcctaattgagcaagtgtagatatatgcgaatgatgtaatgtatgcgtcgttacaggtttcttaatagaactaatctcagttgtctctttgatagtgccccctttaataatgttgctaattttgttcgagtcgatagggccaccagctgcatttgtgaatatgtaccctatattaataaacttatcattacaagcataagtgttcttagtaagtcgatgctatggatagtgaggcctatagccctatagctgttacttgttctagttgtctcttttactccggatgctcccgtcatttttcagttatccaattaactttaccgtcgatatctagcgttttatcttcatagtttatatttactctctttattgcaagtagctcaccgatacgcatgtcattagcaatttgaaactgtaccatagcttttaccattttataattacgttttgtcgttggatatttttatacttaattacatagtcgaaacaatccagtaactccttatcttcattatcttctaaagtgttattacgtttagctagtaacgcatcactatagggatatctattttatctattacacatataactttgaattgcttactattttaaattaacaaattctattctcttagatttagtccaattatgtgtagacgatttatagttattaaattcagagtggtagcaaattaaagttaatcaagagttaagatgaatttaattcatgagcacgtctattatttttataattgaagaaaataaagttttacttcaaggaggtaattaaatatgttcaaaaaaaatgactcgaaaaattcaattctattaaaatctattctatcgctaggtatcatctatgggggaacatttggaatatatccaaaagcagacgcgtcaacacaaaattccccaagtgtacaagataaacaattccaaaaagttgaagaagtaccaaataattcagaaaaagctttggttaaaaaactttacgatagatacagccaaaatacaataaacggaaaatctaataaatctaggaattgggtttattcagagagacctttaaatgaaaaccaagttcgtataaatttagaaggaacatacagagttgctgatagagtatatacacctaagagaaatattactcttaataaagaagttgtcactttaaaggaattggatcatatcataagatttgctcatatttcttatggcttatatatgggagaacatttgcctaaaggtaacatcgtcataaatacaaaagatggcggtaaatatacattagagtcgcataaagagctacaaaaagatagggaaaatgtaaaaattaatacagccgatataaaaaatgtaactttcaaacttgtgaaaagtgttaatgacattgaacaagtttgaaattaagttgaattagtatatacagtgttttattgctaatactttgaaagttaggtatctaaaggtgcctaactttctttgttatgattagcaccatcatatagaaaattctttaatgacgtttatgccgaaatctacaaaaataatttctcttttatggttaatcaatatgtttttacattcgacaaccttaaaattaacttctttcaattccataataaagtctctataaaataacttagtttaaaaacgattcatatctttcagattcaaataccatcattttctactaatacttacactttaattacaattatgtaagttgttttcagagacatcctattttatattttgtcagaggtgatcttttgaaaacgattttaaaaacaataacatatctagcacttactatcattggcgcttatgctgctttattcattttaaaaacaatagactctcatggtataacagatcaatttaacccattagtaaaggaagatgtttcttatgttaaaacgactgaggtgtctactagaatggatgatcaactccgaagttatagtcaaagtgcttttaataaagaagggaaagagacgcaattaatgtatactgctacatttgatgttaaaccgcatagatacttgaaaattacacataaaggtcatcacgtagaaacttttgaagaagttgaaaaggggcaagtacctaaaaaaagcattagacaaattgagtcgattatagcgtgcttatattacatggttcaattataaaatgagtacgaacgaaagtaacacatgatgattaatttaaaaatatttgtaataattatgaataaaattaaaaacaaggggtaatacaatctatatagcatataagcttttgttatgagtttcaaaaaaggaagagagagtgatattatgaaattaaaatcattagcagtgttatcaatgtcagcggtggtgcttactgcatgtggcaatgatactccaaaagatgaaacaaaatcaacagagtcaaatactaatcaagacactaatacaacaaaagatgttattgcattaaaagatgttaaaacaagcccagaagatgctgtgaaaaaagctgaagaaacctacaaaggccaaaagttgaaaggaatttcatttgaaaattctaatggtgaatgggcttataaagtgacgcaacaaaaatctggtgaagagtcagaagtacttgttgctgataaaaataaaaaagtgattaacaaaaagactgaaaaagaagatacagtgaatgaaaatgataactttaaatatagcgatgctatagattacaaaaaagccattaaagaaggacaaaaagaatttgatggtgatattaaagaatggtcacttgaaaaagatgatggcaaacttgtttacaatatcgatttgaaaaaaggtaataaaaaacaagaagttactgttgatgctaagaacggtaaagtattaaagagtgagcaagatcactaaaaagattcgttgcattaacgcttgtaaaatgtcttaattcatattaattattaaaataccctcacaacgcaatgtaatatatccagtatagatttgaaaggatatatgcctaacgtgttgtgagggtttatttgcatctatttatccatgcgaatatcgacttcttctaaatgtttctgatattctttaaccttactttctaaaaacatttcatatggtgcatcaaagaaatcagctaaatgcatggcgtctttaaatttaggttcatggtgatgattctcccattcccaaatttgatgtgcttcatatttagtaccatatttctcatttaattgttgtgctaattcgtcaatttctaaattatgtttagttcgtaagttatataaaatatgcatattcattgttcattaacctcgcttcttgatttaaaattcaaagatgctctaataatatgtgtatattctagtcctataacataaaataatcaagctatgaattcggcagaaaaaataatgtatatgatattgccggtacagagactttaaataacgatagctacattgaataaaattgatattcaattactacttttaaaaatatttggataaaaataatttgaatttgttttagaattgtaaataaggggtactacttagaataacgcaaaataaatagaaaaaggagactgaaaattatgtttggatttattggaatgttaattatcggtggcttaattggatgggctgctggtgctattatgggtaaagatatcccaggtggtattttaggcaatattatcgcaggtattattggatcatgggtaggtggcaaactattcggacaatggggtcctgaattaggaagtatttacatcttgccagcattaattggttcaattatcttaattgcaatcgtaacgttaattttaagagctatgcgtaaataataaaaaaattcaattggaaattgaaataaagatggcattcagttgtcatcttttttatttgcgtgaaaatggtcaatatgtattataatatttgaaaatgtagataagataggattaaaaagtaataaattaatatgaggaaattttggaaataaaaaagcgagtatttgacaaataaaaaaaggatgacgttgggttgcgccatccaggagtattatgttcatgaatataaaagactgtgtagtcatttaagaactacacccatatagtaacacatcacttgattaaagacaatactatttttagagtcattaatttaaaatatgaattaattctttttttagaatagaatattaagattgatatcgaattagtagtcaaagtgttatggtagatatgaaatacataaggtaaggagtaatattatgacgatttatttagttagacatggcgaatcaaaatcgaattatgataataaacattttcgatcttatttttgtggacaattagatgtgccgttaacggatactggcacaaaaagtgcagacgatttatgtgattattttaaagagaaacagattaaacatgtatatgtttcagacttattaagaacacagcaaacgtttgaacatatttttccatatgacattgcatcaacgactacgcctctattaagagaacgttcacttggcgtatttgagggtgaatataaagatgaaatcagtgcgaatccgaaatatgaaaaatatttcaatgatccaaactttaaagactttcgtcatagtttttcacaaaaagcgcctgaaggagaaagttatgaagatgtatatcaacgcgtcgaacattttatgaatcatgttgtcaatgaagatacacaaaaagatgatatcgtcattgttgcacatcaagttgtcattcgttgtttgatggtttattttaacaaagtttcaagggaagaagctgtggatttaaaagttgaaaattgcaaaccatatatcattgaatagaagtatagaggttctgaaaagctgtgttttatagctgccttcagaaccttttttgtatttggaatttaatggaagtcattcttatcaacagacttaccaccaatagctaatgtgataattgcgcttacgaacaaaataattgaagttataaatgacgctaatgtaaaaggtgtaaattgtgtgagcgataatatcaatgataaaaagaaccaagagatagcccctagaaattgtaaaatagcagaagaaattctaaaactcatataatcatatatagctaaaacaagtgaaggtaatgcgactaataccattataatgatgttgagggtgaataaatatggctgttcaaaagttactgtgtttggtcctgttggatgcattgctgttaagaacaagcaaacaatcgtcgataaaattgctaaaataataaaagtaattcgaactttcatcatgatcatcctttgtttatagagtcaatataagtatggaatatgttaggtatatagtcaaatgcgtcaactaatgggaattttaggatggatagtgaatttaaggcaattaaaaaagcatcaaacagtaatatgctgcttgatgcccaaatgatgactttagctaaattgattagtcacttttaaagataaagaattgtcatgaattaaagctcatgtaatgatgtgttacatgtcgcaatgatggctttcagttatttatcgataacatcactcttgatacctttagattttaagaaatctttaattttatcttgttgctttttattaacatcaccggcatattttgttggcacgtcgactacattgattttattttgcggttgatagctaagcttttcaatatcttcatcaacattggcgattgtactatttaaagctttgaagtaattcatcattaattcaacgggtttcttatattctttaggaatattgttttcagtgacaaatttcttgaaatgcaaatcgtttttaacagctaagttagataagtggctaagtgtttctgcttgtttttcagtcacttttgtttgactgtcaatttgtttatctagtttatgttgcataatatatttgttctcaagtatatcgctatttacagacaaatacttttctatagcttgcttcatctctgcatcactaatatcactatttttcttatctgagttaaagatatcttttgtttctaattttttagcgcttttaggtgcatggatgccagtacttgtgtgatgatcttcgttatcagattgatcggacgcgcaacctgtaagaattaatgcagatgctaaaaatgtacttagtagtaatctctttttcataatgtaatataactccttagtttatctttaattgaaaaaatgtgtattcatgtttaatagagtaacattgaattagtttggaatgtcacgatgaccttgcaatgaccatagacgtaaatgattacgtgcatgagttgctttttcaatcaataatgcgtcgttttgaacgttgttaaggatagcattatctataaataactgcataattggttgtatcaatttagacgtaggtatcgtacgtaaaagcataatgatttcgttcacatacttttccttctcaatatcatttttcatattgatttgtttgcgtagataactggtgatctctttaattgcttgatcagatttcaaatagtgatgtctatcataatagattaattcttcaaccgaagctggtacataatatccatcatcagaaatatcaatgccagacgcctcagactcgacaacatcaaataacacaggatgaaacacgaagtcatcttcaacataatatagctcagtaccagctaaagtatctaagctatattgtaactcttctttactaaaagtagcgtcataaaatctttgtaaaagatatagtagatgattagttgataaaataccatacaagtttacagaaccaagtataatacgaagaggtaaaatatcttttttatctattaatcctttcttaatctcagaaatcaattgagtgattgcatcacttcttaagctatcggttgtaccaaaatcttcatcttcaagtaacatatctaagtcaacttcgtcttccataaatgataattctaacgcgtttttaaactctgctaaactattctcaattgtttgctcattaacaaattgatttacagctttctcaaaatcaccattgccgacttgattcacgaaattttcaatatgtttacgcacatcatttggcaaaataagacaatcatattcaaagtcgtaataataataaaaatgaatagttaaaaagttatcaaaatttattaattgcagcttttcaaatttagttagttcattgtttaatcggtagttatcatcactttcaagtatgctagaaagaatatcaaactcaaatagagtagcattagaaaacacttgttcaatgatgtgattattattgaaaaatgctgtcataattaattcaacaagattttgtttgtttttatttgagaatcctttgataccatactgcctgcatattgtttttagctcgtcattagtttttaacagtaaagcatgttctaatgtgacatcgtttaagcgcgtatgttgtcttacacgtaacacttcttcatttaaattcatatggtttattgtatctaacgattcgaattcaccatatgcattatctagtacctctgaattgatatatcttaaaaagaaattatttacaaagaactcatcttcgttaagttgataaacaaaacctagatgatttgttagctttaaaatattaacatcgcgtttatttataattgtgacaggattaccattagatataagtgtttctataaatttttgttctgtcttatccatatcatgataaattttatgtatattttcagggcgtaaagcatgcatcgtgacttcaaatccttctttttgggtcggtaaattaaaatattcgcatgcgttttgtaattttcttgggtatataaaatgaacatcaagcatttttgcacacctcgttgtatatattaagtttatcataacatgattttatgtcgggataaaaaaataacagcatcttaacaaatgtaagatactgtcagtgaaatgaatgaaactttagtttctgataatatagtcaaaggcatttaatgctgcatttgcaccagcgcccattgaaataataatttgtttgttcttctgatctgtgacatcgccagcagcaaatattccaggtacgttagtattattgttacaatcaataacaatttcaccacgttcgtttaattcaacagcatcttttaaccatgatgtgtttggaagtaaaccaatttgaacaaagataccatctaagttaagtagatgttcttcgccggtgctcatgtcttcgtaacgtatacctgtaacatggtcttctccgacaacttcagtagttttggcatttgttttgatatcaacatttgataaagaacgtaaacgatcttgtaacacgttgtctgcttttaattcgctagcgaattcgaataatgtaacatgattaacgataccagcaaggtcaattgctgcttcaaccccagagttaccgccaccgataactgctacgtctttattttcaaatagaggtccgtcacagtgagggcagaatgcaacacctttattaatcaattgctcttcacctggaatgtttagcttacgccaacctgcaccagtagcaataatgactgttttactttctaagacagcaccgttttctaacgtaactttaattgcttcgtcagtcttttcgatatctgtagcacgtatacctgtcattgcatcaatgtcatattgatcaatgtgcgctgctaagttagaagaaaattcagaaccagttgtttctttaacagtaatgaagttctcaataccagcagtatcattaacttggccaccgatacgatcagcaactataccagtacgtaaacctttacgtgctgtgtaaatcgctgcactaccactagcaggaccaccaccaacgattaagacatcataaggttctttattttcaaactcagatgcatctgccgtactgcctagtttcgaaagaatatcttggattgtcatacgaccattgccaaattcttcgccatttaaaaagacagcagggactgccatgatgttttcagattcttcacggaacactgcaccatcaatcatagaatgcgtgatgttagggttgatcacactcattaagttaagtgcttgaacgacatcaggacatttttgacacgttaaactaatgaatgtttcaaaatggaatgaaccttctaagtttttaatttggtcaatgattgactgtttttctttaggtgcacgaccactaacctgtaaaattgctaaaacaagtgagttaaactcgtgacctaatggaatacctgcaaatgttacacctgtttcttcgccaggacgattgactgagaaacttggtgtacgctttaaagacttttcagaaagtgaaagtctaggtgacatatcagaaatttctgttaataattctttgagttccttagatttttcatctgaaccaaggctggcaacgaattcaacgttgccctccattagttctaataattgtttaagttgttgttttaaatcagcattaagcatggttgtaatgcctccttagattttacctactaaatctaaaccaggttgcaatgttttagcgccttcttcccatttagctgggcatacttcgccagggtttttacgaacatattgagctgctttgattttgtgagctaatgtactagcgtcacggccaattccgtcagcgttaatttcagatgcttgtacaacaccgtctgggtcgataatgaatgtaccacgttgagctaaaccagtagcttcatctaatacatcaaaattacgagtgattgtttgtgatgggtcaccaatcatagtgtaagtgattttgctaattgcatctgaatggtcatgccatgctttgtgtacgaagtgagtatcagttgatactgagaatacatttacgcctaatttttgtaattcttcatattggttttgtaagtcttctaattcagttggacaaacgaatgagaagtcagcaggatagaagcatactacgctccaagaaccttttaaatcttcttgtgtaacttctttaaattgatctttttttggatcgaaagcttgcgctgtaaatggtaagatttctttgttaattaatgacataaatatcttcctcctaagaatttaagtatgaattagaactatcaattgattgtgcttaattataataattctaatctcttagttagcattattacattttgatccagaatagtcaactggataactttgtaaagtgaatgattacttttaaaataaagaaagataatataaagtgctttgataatggattttgtagttgatgatttaaaaggttgtgtctatatttaatatcttgattttaatgtaaaaaatgtaaaaaaagaagatttgtattctcaactaagtcaaccttattgataatggtgtgagaatatttgttcgagatggatgaaggtaatgagtgagaaactggatttttaaagtatgagacaatatttttaaaagttcaattattaacttataagcaaataattgctataaaaaagtttggacgtgtacaattgcaatatgaagattttaaattaattgtaaagtatcgaggagtgggtaacgtgtcagaacatgtatataatcttgtgaaaaagcatcattctgttagaaaatttaagaataaacctttaagtgaagacgttgttaagaaattggtagaagctggacaaagcgcttcgacgtcaagtttcctgcaagcatactcaattattggtatcgacgatgagaagattaaagaaaatttacgagaagtttctggacaaccttatgttgtagaaaatggctatttattcgtctttgttattgattattatcgtcatcatttagttgatcaacatgctgaaactgatatggaaaatgcatatggttcaacggaaggtttgctagtaggtgcaatcgatgcagcattagttgccgaaaatattgcggtaactgctgaagatatggggtatggcattgtctttttaggatcattaagaaatgatgttgaacgagttcgagaaattttagacttacctgactatgtcttcccggtatttggtatggcagtaggggaacccgcagatgacgaaaatggtgcagccaagccacgcttaccatttgaccatgtcttccatcataataagtatcatgctgataaggaaacacagtatgcacaaatggcagattacgaccagacaatcagcgagtactataatcaacgtacaaacgggaatcgcaaagaaacatggtcgcagcaaattgagatgttcctaggaaacaaagcaagattagatatgttagaacaattgcaaaaatcaggcttaatacagcgatagcaagataccaaaataacccgcccccctctagcttaaaatgataagtatagctagagggggcgggtatttcttgcaatgaattagtgtgaagttaatgcagcattatcatttgaatcgaaagtatctttatcccaatgtttagttaacttggcggtacctgtaccagctagcattgaatcgttcacgtttaatgctgttctacccatgtcaatcaatggttcaacggagatgagcacgccggctaaagcgactggcaagtttaacgttgacaacaccaatatggatgcaaatgtagccccgccaccgacgccagcaacgccgaatgaactaataatcacgacagcgattaacgttacaataaattgtaaatcaatttctacattagcgacgggtgcgaccataattgcaagcatggcagggtaaatgcctgcacaaccattttgtccaatcgacaatccaaatgtcgcagcgaaattggcaataccttctggcacgcctagacgtcttgtttgtgtttgtacattcaatggtaaggcacccgcgcttgagcgtgatgtgaatgcaaagattaatacttccaaagtctttttaacatagcgaattgggctaatacctaacaggcttaaaataattaagtgaatgatatacatcgtaattaatgcagcgtacgatgcgattaagaattttcctaaagtccaaatggcgccaaagtcacttgtcgataatgtgttggccataattgctaatacaccgtatggcgttaaacgtaagacgaacgtcacaatcgccattactagtgaatagatagcgtcaatcgcacgcttaagcaattcaccatgatcaggttgtttgcgtgctacgcgtaaataagcaaatcctataaacgaagcaaatatcacgacagcaatcgtggaagttgcacgttgtccagtgaaatctaagaatggatttttaggcaataattccaaaatttgttgtggtaacgtatgtgctgttaaatctttcgcttgtttagcaatttcgcttccacgcgcttgttcagcgttaccaaggttaattgttgatgcatctaaaccaaacaccaaggcataaacaacaccaacaattgcagcaatggtgacagtgccaattaaaaagataaaaatgagactaccaattttagcaaacttttctccgatttgaattttagtgaatgcagcgacaatagaaatgaaaattaaaggcatcacaatcatttgcaacaatgcaacgtaaccttgtccgacaatgttgaaccagtcacttgttgatgtaataacattcgaatgtgttccatagacaagatgtaataacacgccaaatacaatgccgatacctaaagctgtaaacacacgtttcgcaaaagatatatgtttgcgagccatcatgtgcaatattacgatgaaaatcaccaatacaataatattaatcagtgtaagaaaagcattcatgaacgtcactcctcaaatttttgaatataattccgactagtatgctaagaataatattaattttaaaatatttcaagagggcatttgcaattaaatgtaaacatgatgaaattcgaccgttggcataagggaatttgtaaacaaatcgttttgaatttagtagagaaaggtgaaaagggttaatagtgttatgacctagtcgattaaagttgatatttgaaaatgaagcagggaattaaacgcaataaattaaataagttgtcattacagcgttaataatagaaatgattttaacgggaaaaaagtgatgaatatttggaaaagatatatatcgtgtactgtcatgagagataagatatgagaaaacaaatgtatccttgaatcgagatgtggctatggcggtttaataaaaattgctaacctcatatttattgaataaaaagataataaatgatcaaccttgaaaagacacttcgaacaaacacgttgtaaaaaattctgtcgaatcaaaattagcatcttttgagggttcgtgtgtgcaggtggtagttcaaaagctaccgtaaaacaaatatttttgtttgagcaaaaaggcgtttgtagaaaatgtgaatatgagtgtgcccttgtgcgattcgtcagttactaacacagccaaacatttaaattgaatgggcttataagatgaattaatttaggaatacacagaagccatcccatttaaaagtaacatactacaaaaatttattcaaaattcaatattaatcataatgaataattaaaaaacctgaaacaaattagtttgatatgctctcttcaaagtagatattgaaaggagtatatcagcttgtttcaggttttatgaattgagtattaaatttgaaagtaaattacagttctatagttttataaaagatcagtttttaaatcaaagctatatattattgagtattacaggctgggacataaatcaatgttctatgctctacgaagttatattggcagtagttgactgaacgaaaatgcgcttgtaacaagcttttttcaattctagtcaaccttgccggcggggccccaacaaagagaaattggattcccgatttctacagacaatgcaagttggggtgggacgacgaaataaattttgcgaaaatatcatttctgtcccactccctacaagttgaataaacgtgcgaagaaaccttttttctcttcttgaggttttggttctgacatttcagactgtgaagctgtgctgtcattttctgctttcgcttccaatgaatcgttcgaagtagcttgtttagaagcttctgcatgggcttctgctacttgttgttcagcatcatgttgcgcttctgcatctattgtagcttctttatttgaagtctcagctgcattgccatttttagactgctcaacgctggctttttcaattgcttcagttgcagaaatttgatcctctttatctactttagtagtagtgccatcgcctgcattgtctgctttagtatccgtcttagcgtctgttgacgtattcactccagcaaccttcgaatctttactgtcagctttatcttcagtaacagcattcttttcaactttatttgttgattcagccaatactttagcttgagatgcttgtgcttcttggatagcctcttgtgatgtttggatagcttttaaggattcgctatttgaatcgattttagatgtaagttgattttgaagttcttttaattcttgttgttgctgatgtacttgattcatcatttgaccaagtaggtgacgttcttcgcgcattttctggatttctaggcgtaaatcttctactaattgagcgacattttgattagtaggtaagtttttgtcatcgtttttgacaatgacttgcaggaagtctttttctttttctaattcatcaaacgctagatcataactatttgtttgttttactttgtcggcaatgtctttgaaaagctcgatatcttcttctttgaaatcagttgcttcacgaccacgatattcagtcttgcttagttggtaaccacgttcttctaaatgttgaacaattttacggacttgcttctcacttagttctacgcgttgtgcaaattctttagttaacatactttaaagtcctttctgcatatgctttatgtatactgacgtttgtctacgggcagtgaaacgtcagtcttgcttcatacatagtttaaacgttattgttagtgatttcaagtttgtttaaaatggtttacgtaaatccatttcttctaataaagcataaataatttcacgtgcgataccatttgcaaatacatacttcaaaatataatttgatttaacacttgtaccgtagatatcctttgtcagtttaatatttttctttaaaaataagtccacttttttagtgtgaccatcattagttggatgaatgtaatcaatttcagtttgtctttcaaattgatgttcgtataaaaactgtctacggtgttcaataatgagtccattatcttgtgttaaatctgcaggttctttagggacttccatcattaaaaagttaatacttctagaatgaacaaggtttgataataagtttagttcatgttcaatttgatgtaatgtttgcgtcattaactcatcatggttgggtaggtcttttgcgaataaataaattaaaaatgctgaattggttgtggcttcataatgtgcagttgctagactgacaacaacatcgttttctaagcctacgataaagacataatcgttttcggttttgttgttttctaatgagcgtttgatgatacgtttatcttcagttaaagataaatttaacttagtatcgtaaagtttaagtgcttcgttgtaatgtggatctttgacagattgaatggttttaaattccataagaacacctccccaatttaaataatattatagcataatcgcctgctgtaaaagactgttcataaacttttaaatggtataaaaaactgtactatcttaaattagacagtacagtaatctcattttgaattcagtgtgataactaagctttgggacctttagatgcttcagcaaaatgtgtaatatcaatctcttcataagctgaattattttcatgcacttcttgatgtgatgatttgtcacgaaccgctacaactaacattttatcgtctaaaataagttgtttatatttttctaattcatcaggcgctaagttgtaacgtgataaaactgcatgttcaccatcttctcctgttaacagtttagtcattctatcactaaatgttccacttgttgagataagggagatttcagagtcgtgtaagtcatttaggtgtaatttacttttactaataattgttagctctgattctaaataaccttcagatttcttttgattgattacgttgtataattcgccagtgtcatttactacagtaatatctgccatagttgtcgcccctttaaaaatttgtttatttaatcttttacccttcttattataaagtaaaacccttacattattaagttataagtcttcattcgcattaaacgtctctgtacatttataaaactattaaaagattacctaagcagttattgaaaaaatgccgaaaatttgctattatcgttaaataatttacataaactcatataatctaaagaatatggctttagaagtttctaccatgttgccttgaacgacatgactatgagtaacaacacaatactaggagtagcttcagccattaaattgtaaccatggtgggtgatttatatcattttatatgatggtcacagtttatttgatgaaacttcttttacattgattgcatgacaaattcgttatgcatgttcgttcactcataaaccctgaaactattatttagtttggggatttttttgtatctagcaccaatttaagagcaaaatgtttcacacaaatctgaggaggttttaagagtggagttactaggacaaaaagtaaaggaagacggcgttgtcattgatgagaagattttaaaagtcgatggatttttaaatcatcaaattgatgcaaagttaatgaatgaagttggtcgcactttttacgagcaatttaaagataaagggattactaaaatcttaaccattgaagcttccggtatcgcacctgcaatcatggctgcactgcattttgatgtgccatgtttatttgcgaaaaaagcaaaacctagcactttgacggatggttattatgaaacatctattcattcatttactaaaaataaaacaagtacggtcattgtttcaaaagaatttttatcagaagaagatactgtactcatcatcgatgactttttagcaaatggtgatgcttcattaggattatacgatatcgcacagcaagcgaatgctaagacagctggtattggtattgttgttgaaaagagtttccaaaatgggcatcaacgtttagaagaagcaggtttaacagtttcttctctctgcaaggttgcttcactagaaggaaacaaagtgacattggtgggagaagaataatgaaaaatttaatcctaagtgttcaacatcttttagctatgtacgcaggtgccatcttagttccaatcattgttggtacaagtttgaagtttacacctgaacaaatcgcttacttagttacagtagatatatttatgtgtggggttgccacatttttacaagccaataaagtaacaggaacaggattaccaatcgttcttggatgtacattcacggctgttgcgcccatgattttaattggtcaaacgaaaggaatagatgtactttatggttcgctatttttatcagggatattagttattatcatcgcgcctttcttttcacatcttgtaaaattcttcccaccagtagtaacgggtagtgttgttactatcattggtatcaatttaatgccagtagcaatgaattacttagctggaggtcaaggtgcaaaggactatggagatgttaagaacattttgttaggtttaatgacattaatcattattcttgttttacaaagattcacaactggatttattaagagtattgccatattaattggactcgttttaggaacgataggtgctggcttacttgggatggtcgatattaatcaagtcaatcatgccggttggttaggcatcccagtgccgtttagattctctggatttagctttgatgtgacatcgacgttagtgttctttattgtagctatcgttagtttaattgagtcgacaggtgtctatcatgcgttaagtgaaattaccggtaagaagttagaaagaaaagattttcgtaaaggttatactgcggaaggtctagcgatagtgttaggttctatattcaattcatttccgtatacagcctattcgcaaaatgtaggacttgtttctttatccggcgctaagaaaaataatgttatatacggcatggtcgtgttattacttatatgtggttgtatacctaagcttggtgcattagcaaatatcataccgctacctgtgttaggtggtgcgatgatagctatgtttggcatggtaatggcatatggtgttagtatattaggtcatatcgattttaaaaatcaaaacaatttattaattatcgctgtatcagtaggattaggtactggtataagcgctgtaccacaagcatttaaaggtttaggtgaacaatttgcatggttgactcaaaacggaattgttttaggcgcaatctctgcaattattcttaatttcttttttaatggaataaagtataaacaaacggaagaaaatgtgaaataatataactaattaatttgaaaaatggaggctgtttttaatgtgggaaagtaaatttgcaaaagaatcattaacgtttgatgatgtgttattaattccagcacaatctgatattttaccgaaagacgttgatttaagcgtacaattatcagacaaagttaaattaaatattccagttatttctgctggtatggatactgtaactgaatctaaaatggcgattgctatggctcgtcaaggtggtttaggtgttattcataaaaatatgggcgttgaagaacaagcggacgaagttcaaaaagtaaaacgctcagaaaatggtgtcatttcaaacccatttttcttaacgccagaagaaagcgtttatgaagcagaagcattaatgggtaaataccgtatttcaggtgtaccaattgttgataataaagaagatcgcaacttagtaggtattttaacaaaccgtgacttacgttttattgaagacttctcgattaaaattgtagatgtaatgacgcaagaaaatttaattacagctccagtgaatacaacacttgaagaagcagaaaaaattctccaaaaacataagattgaaaagttaccattagttaaagacggacgtctagaaggtcttattactattaaagatattgaaaaagtaatcgaattccctaatgcagcaaaagatgaacatggtcgtctacttgtagccgcagcaatcggtatttcaaaagacactgatattcgtgctcaaaaattagtcgaagcaggtgtggatgtcttagttatcgatacagcacatggtcactctaaaggcgttatcgatcaagtgaaacatattaagaagacttacccagaaatcacattagtagctggtaacgtagcaactgcagaagcaacaaaagatttatttgaagcgggtgcagatattgttaaagttggtattggcccaggttcaatttgtacgacgcgtgttgtagcaggtgttggtgtaccacaaattacagcaatttatgattgtgcaactgaagcacgcaaacatggtaaagctatcattgctgatggtggtattaaattctcaggagatatcattaaagcattagctgctggtggacatgcggttatgttaggtagcttattagcaggtactgaagaaagcccaggcgcaacagaaattttccaaggtagacaatataaagtataccgcggtatgggctctttaggtgcgatggaaaaaggttcaaacgaccgttacttccaagaagacaaagcgcctaagaaatttgttcctgaaggtatcgaaggacgtacggcatataaaggtgcgttacaagatacaatttaccaattaatgggcggtgtgcgtgctggtatgggttatactggttcacacgatttaagagaattacgcgaagaagcacaattcacacgtatgggccctgctggtttagcagaaagtcacccacataatattcaaattacgaaagaatcaccgaactactcattctaattaagataaaggagaacgacaaatatggaaatggcaaaagaacaagagttaatccttgtcttagactttggtagccaatacaaccaattaattacacgccgaattcgtgaaatgggcgtttatagtgaattacacgatcatgaaatttcaattgaagaaattaagaaaatgaatccaaaaggtattatcttatcaggtggtccaaattcagtttatgaagaaggttcatttacaattgatccggaaatatataatttaggaattccagtacttggtatttgttacggcatgcaattaactactaaattactaggtggtaaagttgagcgtgccaatgaacgtgaatacggtaaagcaatcattaatgcgaagtcagatgagttattcgctggcttaccagcagaacaaactgtttggatgagtcattctgataaagttattgaaattccagaaggctttgaagttatcgctgatagcccaagtacagactatgcagcaatcgaagataagaaacgtcgcatttatggtgttcaattccatccagaagtacgtcatacagaatatggtaatgatttgttaaacaacttcgtacgtcgtgtttgtgagtgtaaaggtcaatggacaatggaaaactttatcgaaattgaaattgaaaagattcgtcaacgcgtaggcgaccgtcgtgtattatgtgcgatgagtggtggcgtagattcatctgttgttgctgtattattgcataaagcaattggggatcaactaacatgtatctttgtagaccatggcttacttcgtaaaggtgaaggcgacatggttatggaacaattcggtgaagggttcaacatgaatattattcgtgttaatgcgaaagatcgttttatgaataaattaaaaggtgtttcagatcctgaacaaaaacgtaaaatcattggtaatgaatttgtatatgtatttgatgatgaagcatcaaaactgaaaggtgtagacttccttgcgcaaggaacactttatacagacgttatcgaatcaggtaccaagacagcacaaacaatcaaatcacatcacaatgttggtggattaccagaagacatggaattcgaattaatcgaaccaatcaatacattgtttaaagatgaagtacgtaaattaggtattgaattaggtattccagaacatttagtgtggagacaaccattcccaggacctggtcttggtattcgtgtacttggagaaattactgaagataaactagaaatcgttagagaatcagacgcgattttacgccaagtgattagagaagaaggtcttgaaagagaaatttggcaatacttcacagtgttaccaaacattcaatcagtaggtgttatgggagactaccgtacgtatgatcacacagtaggtattcgtgcagtaacatctatcgacggtatgacaagtgacttcgcacgcatcgattgggaagtcttacaaaagatttctagtcgtatcgtaaacgaagtagatcacgtcaaccgcgtagtctatgacattacatcaaaaccaccaagcacaattgagtgggaataattatatatagcaaatgataggctggagttaccgttactatgcggtttccagcctttttggtgtgcttggcatgggcaacatcatgacgtgaaataatgggaatcatctctttcttatattttgagacggagatgatgagaagttagacaaaaatgtagaagaagtatttaacgacaatcctagtcatacaatgattgtagatgatatccgttagaggagtgagagaaaatttatttgttactaagagacaagagttttaaataaatatcttttgtactacataaaagaaagtggtcgttatcatagaatatttggcgataaggtaaatctgattatgttagaacctatatttattgatgatttagtgaggtttgagaagacaagaatgattgaattacaattgacaattgacaccccttagattaatattaatttattagaagtcaactaacgcctcttagcaatgcgaaacacagttggccttttttttgtaataggagaatttatagttatggataaatcacttgaaattaacttaaaagaattagaaggcataatgtataaagaaaaagtaatcgacgttaaagagtatgataatttaaaagtaacttttgagacactaaacgatgctcctaaaagtgaaatacccactccctttacaatagaacaaatgttatataaattagaaactaaaaatttatattttcctgaaattaagtcaaaagaaaaatgtgtggagcttttacatagtgttggctattataatttgaagcattttatgtataatgaatttggtaaagatgagccgaaaaattttgatgaagtatatatactttataaatttgatagatatttattgaaacaattatttagtttagtaaatatgttggaaactcatataagaaatattattttagaagtatatatgttagaaattgagtataataacaagccttcgacactgttctatttagataaagatttatattttgagaaagttaatgatgagtataaatattctgccaaaaagctaaaagagttcaataggttacaaaatgttttttggagagctatagaaaaaaagaaaagtaacgataacgttaaacataatattaaaaaatacaatattataccagcttgggttttattccaaaattttagttttggagatttgtctactttttatagaactacattaccaacttatagaaataaagtaagtaagcgaattgaaaatttaatagaaaaaaatactggtataagcataaaacttccagaaaagttattgtgtgcatggttgaatagtatcaggtttttgagaaatagaatagctcacacagatataatttatggaattaattttacaaacacctgtgcaaaacatcatagtgatgaggaaatgtatgtaaatatagaaaagtataaatatcagcaaaggttagttacatttttattagctatgaagaaaatatttatgagtatgccagaaaataatattattgaatggaatgagactctaactaagatagagaataaatgttcagaacataactttattaaactttctaggttaggagttattgaaaataacctttcttactttaaaataactaaataaaaaatagcgcacactaataactaagtgattgtctttttatgctgaataatgccctgtgttgtagttagaaagattttcaaataacactatatttataaaaatgttgaattataatatggtcggtttattttataggagtaataaaaagcatttatcttttatccgccacaaataatgagtaaatgtaccttgctttcaatgttgatattttacaaccttgtagagttgatttgatatatcatctcatacgttgtaggcaatgaatacgtaaattatgcagtgacatgaactgttgagaagtatagagcattgaaaatcttgatatatcaatagttataaactggtacaaattaacgaaaagtactcttgtcatcgagtgggaataattatatatagcaaatgataggctagaagtaccgttattacgcggtttctagccttttttggtgcgattggtatgggcaacatcatgtgatgaaatgatgggagttatatctgtagaaattggcgtaccaatttctttatgttggggctccgcagtcaactactaccaatataagattgtagagcctacgatttggattttatgtcctgggatcggtttcctattcttattaaatagtatttaaaaatctatactatctatattgaaatttttatttatggttatgccataactactttgtatttccggtactaaactttgcaatattgggtaatagttattagcgaaaccaataataatggaattaatcacattgatactaagttctttatcttcaggtaatgcattttctattattttgattaagtctatatattttatttcatcagaatttttatgtgctaaatacttcataaaatcagtttgcactttttcgaaaacactatatcttaagtccatttgtacaaatattaagctgacagttttagtttcgaattgactttgacccaaaactgaagcaagttcttctattgattgatatagcaatctgatatcgccgttatcttcaagcatatgaaacactcctttaacattttagaataaccatgcaatggcttctttgactacagttgagattattccagcatcacttttacttagaccggcatttattgcgcctcgtttaactgcatcaccgacagcgttagctggtacttctgaccattttagcaatggtttcaattcttttacaatacctgaataccctttatcaaaaatagttgcagcttttttgccaccaacttgttgtatgacattttttgctttgcccctattattaataattagctttatagcagttttaactacttttgttccgccaattcgttgttgtgcttctggattcattggcaagttaggattgcgattaattttcacaccatttatattttcataactttggtgagcagtttttgtattgtttgtctgtatttcatttgcgttagttaaaggtgaaacagacgttaataaaacggcagtcaagactagtgaaccaatagcttttgtgattttcattatacatttatctcctttaatagtgaatttgcaaaaccaaatgtttgaaatataagtaaataatcattaaaaaaacaaagtgagtgaaaggtcctaattcgtataactagcatttaataatttaattaatcgttttcaccaaaatagaaaatgccacttaacacaattattaaaagtaatgtaactatgaaagaagtccaagctaatacaagtgaacatattaaaagtactaatgaagtgactgtttgtaagaacccaaaaagtaaagattccattatataagcaaaataaatagttagtgaaaaaattgctacagcaagtaacatttgccctatgattttcaaaattccagttgtgtagccagtaactaataaatttttcacatgaacttgattaccatattgccatcccgtttataaaatagtttagaagagattgctattaaatttaattgttttgcataagtgtcagaatattattcttaactgttaagagtcgttaatttatttaaatctattaagattgttagagattattatgcgctgggaaacgccactgttacagtggaagaggaatttggataactagatatgttaatcgtaaatgtggcgtcgtgaaacacgacttcaacatcttcgatcaatctatctttgagattggtcgaagattgaaacatatgtaagaaaacgacatagtttatggaaagctcggtaagtagttgaaaaatcaatctagattgaaatcatgcatatcgtttaataaaatttttcggagaaataaaaacttactaaaaacgaaaaggtttatttgatttatttacttgtatattgtaaatggttaaaatgagtctatagattatgtagagaactctagtatgccttttgagtatatgtgggattctttctttatataaaaggagttcggagtggcaacactaaaagatgtaaagactggtaaaaaggaaattttgccatcaactgcaaaagataaaaatggtaaaaatgttacgttaatttattttgaaaaagacggtaaattaggtttttatgtgcagaaaacacaaaaagaacgtggagtagggaaatgcgtttctggtatagcgggtggcgcagtgacaggaggcactactttaggtcttgcaggtgcaggagtaggaacagttactattccagtaattgggacagttagtggaggcgtagttggagctgttggtggtgctgtcggcggtggtctaaccggtggagccacattctgctaatagtgtaggagtgataccatgaaaaaattttttaatctatgggtatgttcgttcttatttttagtaataatatcatgggtaataattagtataaaatttggtaatatcagcacgatgcaaatattaatttctaatctgtttatatttattgcttatttactatatttagttaagttcattcgtttcaaaaaaacagtggcgatcagtaaacaagtataaagaaagtcgattttgtctttctctcgaacatatataagtttatatagatgtagagctattttttatttgtaaattattttgtaattgaaaatgagtatgaacatgttctccaatcaacagagtatgtctcggaagaaatctattatacttatgtgaataagtcataatgtcagacatatatataataagacgaatagattgtaaatagctttttacttttaattgttgatattccaatattagtacctatatttattgaagatatagtgagatttgaggatagatgtattttaaattatagaattgatgatttatttcaaatattaatggaattatatttgaaaattaataacacttagattaatattaatttatcagaagtcagctaacgcctcttaacaatgcgaaacatagctggcctttttttgtaataggaaaatttatagttatggctaaatcacttgaaattgacaaatctataattaaatacgcacgtaagtaattttgatcgttcattgttattgttttatgttttaggaaatgtgctattgaaaggtttaaagatgattggaatttcttggtttcttgacttatatagttatgaaagagggcgttgtccttaatggcatttctgagatcagaaatgctattaataaacatttggaatatacaaatataactgaagaatgtatttaaaaacttagaatgtatatctatccttaaatagttgtagtactattgatctttaaacataagatgtaaatggaaaagatattgtattttaacaacatttcaatttataatatatttgtatgtcatatttctagcaatttttatagttttatagctatttaattcgtatttgagataaaaggagaggtttggatgggatatagaatagaaacaagaacgtttgaagagttagaaggaaaattaaagttaccaacttttcaaagagcactagtttggtctaataatcaaaagcaagaatttttctcaacgctgaaagatggttttccttttggttctattctgttatacgaatatgaaaatgataataaatacagtcttattgatggcctgcaaaggtattctacaatggtagatttcatggagaatccaacaaactatattgaatttgaagattttacattgaaaattgctgaattgtataaaggggcatcagagagtacaaaagcagaagtagttaattatgccgaagatattctgctgaaaattattgaaaaatatattgattctacaaaagaaaatgtaaaagtaaatgaactagctaaaaaaatggtggataaatttccagtattaggtgaaacagatattagagatgaaatcactcaaatacagtcagatgttattacttattttaataatcaactagatattagtaatgtcaagattccgtgtatcttctttgaaggagaagagactgaattggcagaagtttttcaaaggttaaacagtggaggtaaaaagttatcgaagtatcaagtttttgctgcacattgggacagatatgaagttgaattgggagatttaaagtatagtgatgagatacttaaaaatgtaatagaaaggtacgaaagattaaataatgatagaggtatcttaattgaaaattttgaccctaaagaaatggagacgtcaagagtaattaatttatctgaattatgttatggacttggtaaagtgatttctgatgaattacaagcattttttaaagagtcaacagaagatatatgcaatgaattaggatttcaaacaatgctaattgtatttggcattcctacaaataagatgaatgagttaccatataaatatcaatatatgaagaataaaaataatatagaaatcttgtttgaaaaaattgtgaagatatataaaataataaataacaagtttaaagaagctttctctatggtagtatcgtcaagagaagataaatatgaaactaaatcttttactagattacaaataatgtcattcttttcatctttatggatctcatcgtatagtattgaattagatgaaaataaaaacacattttctattaaacaaactaaatctttgaaaaaaaatcaacaagtgattttgtctaatatcataatttatgcaatttatgatgtgataagaaagtactggtcaggaacaggtgatcgaaaattaatggatatatacatatctcaaaacaatagatatttaaagccgttagcaaaagaagtgtttagaaatgagctacttagatggaatgaagagaatataaataagacaagtattaatattcaaacggatgagaagatgatcattacttttattgctaataaatttagaagcttctattcatctttgaatgataatttagattatgaacatattttttcaagaaaattatacaagctgcataaaggtaatgcaataatccctgctggatctttaggtaacatcatgttacttgactctggtattaatagaagaaaaaaagaaaaatttctttattcagcaatagatattgataaggcatctattacgggaactatagaaaatcagtatgttaacaacagtttttatccagataaaagaacaatagatactattgaaatagatataattgatgaaaaatatgatagtttaataaaaatgatcaaaaatcgtggtgataaattaatagaagaagttgttagagaattatataaataagtttgatatatcttgctttttattatcacgctagttgatggtatctttaaagtgtgtattacctgattgatatcaataccaggtatcgaatgaatatttttaaaataattgagttgttgtgctaattgaatcatggcatcatttaattgtttgatacgatggatagattgttttaattgtttaggcggcctttgttggtcgccatttttatataataatataaatgaccaaaccacagcacctattaatttaagagtgaggtcatttttaaaggtaaaaaaggagtaattttatatattaaaatgatatataaaacaagtagtattagtatgttgtgaattgttatagaatttgacttgttagcaatttcgtagttattgtaatagcaagtactgtatggttttattttttaaaggtagtgaaataatattggatttttgaagtgaaatatttgtagatggatacaacgaagcatattagaaatacaaaaggaacgatgaaattaaatgtccatcattccttatgcctagtagttttttagttaatatatttaattgctaacttattattagggtctctttcaagaattttatttgcgaccaattgaatattctcatgtgaaatcatattaaagtctggttctccaaggatttctaaaaattcgtataataaattagcattattaaattgcgaaatctctaacgattgccaataatgatagtatgctaaatcataggcattatctatgtaattgaaatgaaagtgatagatgcttgcgaccatttcatgatattcaattgtatttatttgattcgcaagatttgataaatatgatactaatttttcatctgaaatttcgttcgacataaagtatgttagaatattctccatatctttattctctaacatattttttaattcagttggtaataaatttaatagaatgttaacgcttttcatttatttaacccatccattcgatatatatattgccattttttcgtgtataagttatgactacagttctatcactcatgacaagtgttttttggtatgcggactttttgtatcggctttgctttccatacctcataacatgcgacattactttagaaacatctttccaattgtttttagtaactttattccaattatgtttactagcaagaatatgttttcttttattagctcctagattggctacagaaggtaaaaatttaccaaaactctttgttttgatagcggtttgagttgctttttttccatatgttttaattgcatagtttattccgtatcagctactgcagctaatattactaatggcaatgcagaagatttagcttcaattgagttgaattttattatttcgccagtttctttgtcgattaatgtagcttcatattcttcattttcaaattgttctacgaaaacgtcataatccttatttattagttttccattttcatcgacgtatctgcccttatcatccatagtattagtattcaaatcatattgaatatttttatctaaatcaatatcttttttcgtttttccactaacgtctttttcaagctttatatttacaatttttaagcagaagtatcccattatttcaaggtctgatttatctataattaaatacgtacgtatggaattttgatcgttcatttttattgctttatgttttaggaaatgtgctattgaagggtttaaagatgtttggaatttcttggtttcttgacttatatagttatgaaagagggcgttgtcctttattaaatttctgagatcagaaatgctataaataaagtgattaagattttttgttttcatgtaatttaagaaatggatttgttttttgtgggttatttttaattctattatgaaatggtttgaattttgcagttgcaaatatgatagctgcttcttttgacaaagtaatagaacctttttcttctggtaccatgatattcactccttgtacaattcaatttaagtattataaaataattttactatacaattacctttgtgtaaatcgtttcttattgttaccaaattatttgtttaaaagcattatgcaatgccaatcaacactaatggggtgtaagtatttccctgttaatattttattagcgttatttacatataccttctgtaatgtgaatttttaaaattacagtttacatgtaacgttgtgcaatatattctgtatatagaagtgtaaaaacacaattgggttggtagtcccaatgcagttttaaaactgtcagtaaccttcctcctcgggtcgtccgtcatttctaataaaactagaggagggatagcatggagctatctattttttacaatgggcaattttttgtagcattggtagaatataaaatggaaaataaatctaaatttatccaatacacatttgggaatgaacctgatgatatagaggtattggattttattcatcatcaattaatgaaaatgattgatgatgtgcaaactattgtttatacgaaaaatatttctagaaaagtaaacccgaaaaaactacaacgacaaattgctaaggagcaaaagaaacctaaatattctacccaagcacaaatagctattaagaaagaattagaattaaagaaaaagcaaaagcggaagcgctataaagaaaaacgtgatgcatttcaaaaaagaaaaagagaaattaaaaaggttaaagcaaaagagaagcataaggggcattagcgatacgacaaataaattaaaacaaatagatttataggtggttgggatgattttaattagttcgtgtttgataggcgataatgtaagatacgatggtggtaatcaattgaatgttagattgaaaaaattaatagacagcggaaaagctattcacgcatgtccagaattacttggtggattattaattcctagagaacctgcagaaattattggtggcgatggttttgatgtatggaatgacgctgcaaaggttgttactatttcgaacaaagacgtaactgacgattataaacatggagcaatagttacattaaaaattttgaaaaaatatcaatgtgatacagttattttaaaagcaaatagcccatcatgtggatcacaagagatatatgatgggaattttacaggaaataagaaaaagggtgtaggtgtggcaactgctttactcattaatgaaggtataaaagtttatgatgaaaatacgttttttgaccaaaacatgaatgaaacgatagtacatgaaaagtaagtattgaggatatacgtaataaaccaaacatttaagttgtaagatactttataaaatattttttaaaatcgttgaaatgatattcaagttgtgataatatatcggtacagataattttgttaacagatccatgagagtaggaaccccaccatacgggaatttcgaaatcatggattttttgatataaaggagtgatgtaatggaaaaagtagccattttagtagatggtggatactatagaaagataagcgcaaaagtctacggaaaagttacagcgaaagaaagagctgacgagttatatagttattgcaatagacacttaaaagagacacatttcaaagaagaaatatataataaattatacagaatattttactatgattgtcctcctattgataagatagtttatcaccccttattaaaaaagaatgtaaatttttccaatactgatacgaaaaagtggacagaagactttttcaaagaaatgagcaaaaaaagaaaggtagcattgaggttaggagagttgagtgagtattcagttgaatacaacttaaaatactctattacaaaaaaattattaaatggaagtatcgatttaaatgatttgaaagaaaaagatttttccctatcattacaacaaaaaggtgttgatatgaaaataggtttagacatagcttcattatcatttaaacatcaagtagataaaattattttaatagctggtgatagcgattttgtacctgctgctaaactagcaagaacagaaggaattgattttgtattagattctttaggggcagatattagaaacaacttgtcattacacattgatggtaggcgtacttgtgatgaaaaatttaaattttatttaaatcaactatttaaataataatttttttaaaacgcatcttctactttacagacgtttatagctattagtatttatcagctaaaaattaaatcagatatgggttttcgtcattaaataatttttctataaggaaacagaggcaacgttactgtcacctctgcttgaaataattaggatgaaatactctgagtctaaagtccacacccaattcgctcacatcctccaaacctccaaacctccaaacctccaaacctccaaacctccaaacctccaaacccccaaacaccaatatttaccaaagcattgatatgagtgccaatactggcaatgtaccttgtttgaaaaagatactaatattgcttgaaaggccaccataaatagcaacgccaatgatatacactaaaatagctgcgcatatttcttttggattactgctgataaacaaaccgtatattagcaaaattccgattaaaccgttatatacgccttggttcttcaaaagtaggttaatatttttgtctttcaatttatcgacgcttatattaaatgtctcgctagtctttttggaagttgtagcaatcgtttcaaggtacataatatagaaaaactctaatgccacaaatatgattaaaattgttgagatgatattcactgtaacgctcctttattattaaatattttcttgtaaaaatgattgcagtgtctgtggttgatcattgactaattgttggaaatcattggattcttggtctaatagtcctcttgctcctgcgtcgtacattgatgccaataatgcaccaaagcctttaggttcatcgtacatttctgcaaatgtctctaatgaaacgggctcatatttaatttctgtgcctgatgcctcagataaaattgcagcaagttctttcatatcataactgtagcctgataataaatagcgtttgccccaagtatctggatttttaataatagcaatgacacctctagcaatatcatttctagtaatataattaatacgaccatcaccagctggataaatcagtttatgcatattcatcaattctggtaaatatggtttaagtggatccatgtacattgccattcttacataggtatagtcaataccacttgttgccaatagacgtgctgcataaccaaaataaggactcatatggaatggattattatgctgatctgcgtaataacctatgaaaatgatatgagcaacgccactttgctttgccgcatatactaaattttccacttctggaatacgtttgaatgatggatggataatacttggaataaacacaacggtatccattcctttaaatacctctaccatgctttcgggattaaaataatctaattgtcgaacaggaacttttccgcgccaatcttctggaactttctcaacatttctaacaccaatgtgaaaatgatctatgtgatttgcaatggcttgatttgtaatatgtgtgcctaaatgacctgtagcacctgttaacataatattcattcacttcatctcctaatctttatatacataacataatacttattcgattgttttcaaaacatttgattttataaaaaattgtaatctgtatttattatcgctgtgtatagtaaatacgtatatgttattaatgttgaaaataccgtaatgacgcgttttagttgatgtgtatcactaatatctttggaaattttaatcaggtactacgacaatatgatgtctgttttgtgtctgaaagttttacagtttttaaaataaaaatggtataaagtgtgatttgtataaaaaagagtctcgacggataagaattgattaataacagttagcattttattaattaccttaacaatgattcaagtttagttaaatgaggtttaatttgaaaggggatagcgcctcaatataatgtaggtagattgttcatattacgtaattgaaaaatcaaatttaaatagattggggctaaaaattatgaaatttaaagcgatagcaaaagcaagtttagcattgggaatgttagcaacaggtgtaattacatcgaatgtacaatcagtacaagcgaaaacagaagttaaacaacaaagtgaggctgatttaaaactttattataatggaccaagttttgaatataaaaaagtaactggatatggatttattgaaggtaaagatagatttattgattttatatacaatggacaatataataaaatatctttagttggttctgataaagataaatataatgaagaagttaacccagatatagatgtgtttgtcgttagagaaggaaacggtagacaagctgataatcattcgattggtggcataacaaaaactaatagaggagtgtattatgactatatacacacaccaatccttgaaatcaagaaaggtaaagaagaaccacaaagtagtctataccaaatttataaagaagacatctcactaaaagaacttgattttaaattaagaaagcaattaattagtcaaagtggcttgtattcaaatggtcttaaacaaggtcaaattacaattacaatgaatgatggcacaacacatacaatcgatttaagtcaaaaacttgaaaaagaacgtatgggcgagtctatcgatggcagacaaatacaaaaaattctagtagaaatgaaataatactttctaacaacaaagcgctatgttgaatagtgcttgttatggaaatatatggaagttaagcgacgtactgttgcttagcttctttttttgaggggaaaagttacaaaactcacacaaacagtcgcaccacgcattatcttttgcttaaatagcttaatcatattttatgaatagttaaaaacaggttaatgtgaatatctgaatacagctcctataatatgggtgtatggttcaaattacgtaataaaacaatctaattataatagattggagcatacagctatgaaaatgaaatcaattgtaaaaataagtttgttattaggaatattagcaacaggtgtaaacactacaacggaaaaaccagttcatgccgaaaagaaacctattgtaataagtgaaaatagcaaaaaattaaaagcttattatactcaacctagtattgaatataaaaatgtgacaggttatatcagtttcattcaaccaagtattaaatttatgaatatcatagatggtaattctgttaataatattgctttaattggcaaagataagcaacattatcatacgggtgtacatcgtaatcttaatatattttacgttaatgaggataagagatttgaaggtgcaaagtactccattggcggtatcacgagtgcaaacgataaagctgtcgacctaatagcagaagcaagagttattaaagcagatcatattggtgaatatgattatgactttttcccatttaaaatagataaagaagcaatgtcattgaaagagattgattttaaattaagaaaataccttattgataattatggtctttacggtgaaatgagtacagggaaaattaccgtcaaaaagaaatactacggaaagtatacatttgaattggataaaaagttacaagaagaccggatgtccgatgttatcaatgtcacagatattgatagaattgaaatcaaagttagaaaagcataacacacatacttgacgacgaaataatttgaaattgaaatagagaggttaagtgacgatcaaacgttgcttaacttctttttaatgcttaaaaatcatttcaaaggcacatagaaacgctatattaacctcataatcactcattattttttgcttaaattacttaataatacttcaataattgttaaaaggggtttaatgtgattatcttagaatgccatctataatgatgttgtatgattcaaattacgtaaaaagacaatcgaatataatatagattggagcatacaattatgaaaatgagaacaattactaaaaccagtttagcactagggcttttaacaacaggcgcaattacagtaacgacgcaatcggtcaaagcagaaaaaatacaatcaactaaagttgacaaagtaccaacgcttaaagcagagcgattagcaatgataaacataacagcaggtgcaaattcagcgacaacacaagcagctaacacaagacaagaacgcacgcctaaactcgaaaaggcaccaaatactaatgaggaaaaaacctcagcttccaaaatagaaaaaatatcacaacctaaacaagaagagcagaaaacgcttaatatatcagcaacgccagcgcctaaacaagaacaatcacaaacgacaaccgaatctacaacgcagcaaactaaaatgacaacacctccatcaacaaacacgccacaaccaatgcaatctactaaatcagacacaccacaatctccaaccataaaacaagcacaaacagatatgactcctaaatatgaagatttaagagcgtattacacgaaaccgagttttgaatttgaaaagcagtttggatttttgctcaaaccatggacgacggttaggtttatgaatgttattccaaataggttcatctataaaatagctttagttggaaaagatgagaaaaaatataaagatggaccttacgataatatcgatgtatttatcgttttagaagacaataaatatcaattgaaaaaatattctgtcggtggcatcacgaagactaatagtaaaaaagttaatcacaaagtagaattaagcattactaaaaaagataatcaaggtatgatttcacgcgatgtttcagaatacatgattactaaggaagagatttccttgaaagagcttgattttaaattgagaaaacaacttattgaaaaacataatctttacggtaacatgggttcaggaacaatcgttattaaaatgaaaaacggtgggaaatatacgtttgaattacacaaaaaactgcaagagcatcgtatggcagacgtcatagatggcactaatattgataacattgaagtgaatataaaataatcatgacattctctaaatagaagctgtcatcggaaaaacaagaagttaagtgacaacggtttacatgttgcttagcttcttttattatgcgtaatgatgtaaaaagacgaatattcatttgtttgtaaaagtggcatttctatgtcttaaaagtgacgaaacttcaaatgtgccaagtgttgaatcacatcaaaatcatttttatttaacgaacattatggatttcttaatttacttaacgatgattcaaatatagttaaacaaggtttaatgtgaatggagcaatgcgccatctataataaagctgtatgattcaatgaatgtaatcgaacaaatctaataattacgaatggagcatacaactatgaaaataacaacaattgctaaaacaagtttagcactaggccttttaacaacaggtgtaatcacaacgacaacgcaagcagcaaatgcgacaacaccgccttcaactaaagtggaaacaccgcaacaagtagcaaatgcaacaacaccatcttcaactaaagtggaagcaccgcaacaagcagcaaacgcgacaacaccatcttcaactaaagtagaagcaccgcaatcaaaaccaaacgcgacaacaccatcttcaactaaagtggaagcaccgcaacaagcagcaaacgcgacaacaccaccttcgtctaatgtagacacatcaccaccacaatcgccaaccacaaaacaagtaccaacagaaataaatcctaaatttaaagatttaagagcgtattatacgaaaccaagtttagaatttaaaaatgagattggtattattttaaaaaaatggacgacaataagatttatgaatgttgtcccagattatttcatatataaaattgctttagttggtaaagatgataaaaaatatggtgaaggagtacataggaatgtcgatgtatttgtcgttttagaagaaaataattacaatctcgaaaaatattctgtcggtggtatcacaaagagtaatagtaaaaaagttgatcacaaagcaggagtaagaattactaaggaagataataaaggtacaatctctcatgatgtttcagaattcaagattactaaagaacagatttccttgaaagaacttgattttaaattgagaaaacaacttattgaaaaaaataatctgtacggtaacgttggttcaggtaaaattgttattaaaatgaaaaacggtggaaagtacacgtttgaattgcacaaaaaattacaagaaaatcgcatggcagatgtcatagatggcactaatattgataacattgaagtgaatataaaataatcatgacattctctaaatagaagctgtcatcggaaaaacaagaagttaagtgacaacggcctacatgttgcttagcttcttttgttatgttcgatgatttgagaacccgaattttcgatgggtccaaatatgacgtggaagagtcctgaatttatctgtaaatccctatctatcgggtgtggagcacaacggaatcagttttatttaacgaacattatagattccttaatttacttaataatgattcaatgattattaaacatggtttaatgtgaaaggtcaaatacgccaattataataaagctgtatgattcaatagacgtaagcgaacaaatctaataattacgaatggagcatacaactatgaaaatggcagcaattgcgaaagcaagtttagcattaggtattttagcaacaggaacaataacgtcattgcatcaaactgtaaatgcgagtgaacatgaagcaaaatatgaaaatgtgacaaaagatatctttgacttaagagattactatagtggcgcaagtaaggaacttaaaaatgttactggttatcgttatagcaaaggtggcaagcattaccttatctttgataaacatcaaaagttcactagaatacaaatttttggtaaagatatagaaagatttaaagcacgcaaaaatccgggattagacatatttgttgttaaagaagcggaaaaccgtaatggcacagtgttttcatatggtggtgtcactaagaaaaatcaagacgcttattatgattatataaacgcaccaagatttcaaatcaagagagatgaaggtgacggtattgctacgtacggtagagtacactacatttataaagaagagatttcacttaaagaactcgactttaaattgagacagtatttaattcaaaattttgatctgtataaaaagtttcctaaagatagtaagataaaagtgataatgaaagatggcggctattatacgtttgaacttaataaaaaattacaaacaaatcgcatgagtgacgtcattgacggtagaaatattgaaaaaatagaagccaacattagataatgcaatgaaatatggataatagtaaaatatggatagtatagaggagttaggcaacataagttgcttagcttcttttttgtgttggagagatgaaaaagaagcgtatcgatgaataataaaaacaccaataaaacttgtgggaatagttgatacctatagtcgcgcgttgtccttttcgtgacatgaaacaatgtggaaaacataattaaattgagggaaagtgtgaatagttaaaaaagctgcgttaagtttaaaaaatagattaacgctgttaggattctattaattagcttaacattggttcaaaaatagttaaaaagaggttaattcatagcttagtattccgcttatataatgatagtagattgttcgtattacgtaattgaaataatcatataaaaatatattaagacaaaatttataaatagattgggagaatagtactatgaaattaaaagcgttagctaaagcaacattagtattgggattgttagctactggtgtaataacaacagaaagtcaaacagtaaaagcggcagaatcaactcaaggtcaacacaattataaatcattaaaatactactatagcaagccaagtatagagttaataaatgtagatggtctgtatagacaacatttaactgataaaggtgcatatgtatggaaaaatcttaaagattattatattgggctactaggtgaagatagtaagaaattcaaatcagatgtatacggggacctagatgcatttttagtcatagaagaagaacctgttaaaggaagacaatattcaattggcggtataagtaagacaaatagtaaagaatttaaagaaagagaagtcgatgttaaagtaacaagaaaagcagacagagatactacatcaactaaagatagtaaatttaaaattacaaaagaagaaatctcgttaaaagagttagattttaaattaagacaaaaattgatgaaagaagagaatttatacgatgcaattaaccatagaaaaggtaaaattgtagttaaaatggaagatgataagttttatactttcgaacttacaaaaaaattacaaccgcatcgcatgggtgacacgatagatggtaccaaaatcaaagaaattaatgttgagctagaatataaataatctttggacaagcagactagtaattgtagggaagttaagcgataacatattgcttagcttcttttttgttttgttatgatgaaaaaaggagcgggtttatgatcaagtttttggaaaaacggttgatacttatagtcgcgcgttgtccttttcgtgacatgaaacaatgtggaaaacataattaaattgagggaaagtgtgaatagttaaaaaattagtattgtgttataaaaaataattaatactgttaggatttcattaactaacttaacgttggttcaaaaatagttaaaaagaggttaattcatagcgcagtatctcacttatataatgatagtagattgttcgtattacgtaattgaattaatcatataaaaatatattaagacaaaatttataaatagattgggagaatagtactgtgaaattaaaaacgttagctaaagcaacattggcattaggcttattaactactggtgtgattacatcagaaggccaagcagtgcaagcaaaagaaaagcaagagagagtacaacatttatatgatattaaagacttacatcgatactactcatcagaaagttttgaattcagtaatattagtggtaaggttgaaaattataacggttctaacgttgtacgctttaaccaagaaaatcaaaatcaccaattattcttatcaggaaaagataaagataaatataaagaaggccttgaaggccagaatgtctttgtggtaaaagaattaattgatccaaacggtagactatctactgttggtggtgtaacgaagaaaaataaccaatcttctgaaactaatacacctttatttataaaaaaagtgtatggcggaaatttagatgcatcaattgaatcatttttaattaataaagaagaagtttcactgaaagaacttgatttcaaaattagacaacatttagttaaaaattatggtttatataaaggtacgactaaatacggtaagatcactttcaatttgaaagatggagaaaagcaagaaattgatttaggtgataaattgcaattcgagcacatgggcgatgtgttgaatagtaaggatattcaaaatatagcagtgactattaatcaaatttaaagtaagtaatcaatgactctaaagtaataaatttgaagcagcttagcgatgaaatgttgaatagatacgtacaccttacataaaggagcgtatttaaaacaaccttgtcgttaggctttttttacgttttataacgcagggtatgagcgtactaaaaattcacattacttctgaaagtgatgtccattgaatattaattagttcttcattaaccatgatttaattttaattaaacgagtgttaatgtcagtctgtctcaatgccctttataataaatgtgtattattcaaattacgtaataaaagcaatccaatatattaagattggagcatatgaatatgaaatttacagcgatagctaaagcgatatttgtattaggaatattaacaacaagtgtaatgataacagaaaatcaatcggttaatgcaaaaggaaagtatgaaaaaatgaaccgtttatatgatacaaacaagttacatcaatactattcaggacctagttatgagttaacaaatgttagtggccaaagtcaaggttattatgactctaacgttttgctttttaaccaacaaaatcaaaagttccaagtgtttttattgggaaaagatgaaaataaatacaaagaaaaaacacatggtttagatgtctttgcggtaccggaattagtagatttagatggaagaatatttagtgttagtggtgtaacaaagaaaaatgtaaaatcaatatttgagtctctaagaacgccgaacttactagttaaaaaaatagacgataaagacggtttttcgtatgatgaatttttctttattcaaaaggaagaagtatcattgaaggaacttgatttcaaaataagaaaactgttaattaaaaaatacaaattgtatgaaggggcagctgataaaggtagaattgttattaatatgaaagatgaaaataagtatgaaattgatttaagtgataaattaggtttcgagcgtatggcagatgtcattaatagtgaacaaattaaaaacatcgaagtgaatttgaaataatcaatgatatatatagaatgaaagcttaagaagcggtttaataatcccatgtttaatgattttgatacgtgttttaataataaaaacatatcgaacattgactacgttattaagctgcttttttgtacactttgtatcgaataacttaagatctaaaactaatcggaaagaacaatgattcccctaaaaaaatttatgttgctattaaaaatcagttaatacgaatgttaacatacgtttgattttcattaataatgattcaagtttatttaaatgagcgttaatgtcagtctgttttgatgcaccttataataaagacagatagttcaaattacgtaataataacaatccaatatatcaagattggagcaaataaatatgaaatttacggcattagcaaaagcaacattagcattaggaatattaactacaggtgtgtttacaacagaaagtaaagctgttcacgcgaaagtagaacttgatgagacacaacgcaaatattatatcaatatgctacatcaatactattctgaagaaagttttgaaccaacaaatattagtgttaaaagcgaagattactatggctctaacgttttaaactttaaacaacgaaataaagcttttaaagtatttttacttggtgacgataaaaataaatataaagaaaaaacacatggccttgatgtctttgcagtacctgaattaatagatataaaaggtggcatatatagcgttggcggtataacaaagaaaaatgtgagatcagtgtttggatttgtaagtaatccaagtctacaagttaaaaaaatcgatcctaaacatggcttttcgataaatgagttgttctttattcaaaaggaagaagtatcgttgaaggaactggattttaaaataagaaaaatgttagtcgaaaaatatagattgtataaaggcgcgtcagataaaggtagaatcgttattaatatgaaagacgaaaagaaatatgtaattgatttaagtgaaaaattaagttttgatcgtatgtttgatgtaatggatagtaagcaaattaaaaatattgaagtgaatttgaattaattaagtataataacttaagaagcgacttaacgacaaaatgtgaattgacatgcatgtccttaaataaggaactgtgttaaatacattactgttgttaagttgttttttgcgtttcaaagagcagaacagagtaacatcatcagttgtagtaaacgataatctagtaaaacaactaaatgaaataatgaaattcatttaacctgaacattaaaatatatttgtttttcattaagaataattcaagtatatttaaatcgaggttaattatcgtatgaaacgatgcacgttataataaaaatgtatgattcaaattacgtaatgaaaacaatccaatatattaagattggagcaaaacaatatgaaattaacagcgatagctaaagctgcattagctttaggaattttaacaacaggaactttaacaacagaagttcattcaggtcatgcaaaacaaaatcaaaagtcagtaaataaacatgacaaggaagcattataccgatactacactggaaagactatggaaatgaaaaatattagtgctttgaaacatggtaaaaataacttgcgttttaagtttagaggtattaagattcaagttttactgcctggaaatgataaaagtaaatttcaacagcgtagttatgaggggttagatgtgttttttgttcaagaaaaaagagataagcacgatatattttatactgttggtggtgtaatacagaataataaaacatctggagttgtcagtgcaccaatattaaatatttcaaaagaaaagggtgaagatgcttttgtgaaaggttacccttattacattaaaaaagaaaaaataacactaaaagagctggattataagttgagaaagcatctaatcgaaaaatatggactttataaaacaatctcaaaagatggtagggtcaaaattagcttgaaagatggcagtttttataaccttgatttaagatctaaattaaaattcaaatatatgggggaagtcatagaaagcaaacaaattaaagatattgaagttaacttaaagtaaataattacgaataataaaaagtaattgaagcggcttaacgatgaaaagtaaattgatgcgcataccttaccaaaaggatgcatcaatcgatatcgtcgttaagctgttttggtttacgtttcatggattctaccccaattttcataaatataaaaattccaccaccaacatcaaaattctcaacatcgcaacatacccaaatgttataataaatctattacacaaagagataaattacttattcaaaggcggaggaatcacatgtctattactgaaaaacaacgtcagcaacaagctgaattacataaaaaattatggtcgattgcgaatgatttaagagggaacatggatgcgagtgaattccgtaattacattttaggcttgattttctatcgcttcttatccgaaaaagcagaacaagaatatgcagatgcgttggcaggtgaagatatcacgtatcaagagacatgggcagatgaagaatatcgtgaagacttaaaagctgaattaattgatcaagtcggttacttcattgaaccacaagatttattcagtgcgatgattcgtgaaattgaaacgcaagatttcgatatcgaacatctggcgacggcaattcgtaaagttgaaacatcaacattaggtgaagaaagtgaaaatgactttatcggactgttcagcgatatggacttaagttcaacgcgactaggtaacaatgtcaaagaacgtactgctttaatctctaaagtcatggttaatcttgacgatttaccatttgttcacagtgatatggaaattgatatgttaggtgatgcatatgaattcctaattgggcgctttgcggcgacagcaggtaaaaaagcaggcgagttctatacaccacaacaagtatctaagatactggcgaagattgtcacagacggtaaagataaattacgtcatgtgtacgacccaacatgtggttccggttcattattgttacgtgttggtaaagaaacgcaagtgtatcgttatttcggtcaagaacgtaacaataccacttacaacttagcacgcatgaacatgttattacatgatgtacgttatgaaaatttcgatatccgtaatgatgacacgttggaaaatccagcctttttaggacatacatttgatgcggttattgcgaacccaccatacagtgcgaaatggacagcagattcaaaatttgaaaatgacgaacgattcagcggatacggcaaacttgcgccaaagtccaaagcagactttgcctttattcaacacatggtacattacttagacgatgaaggtaccatggccgttgtactcccacatggtgtcttattccgtggtgctgcagaaggtgtcattcgtcgttatttaattgaagaaaagaactacttagaagccgtgattggcttaccagccaatattttctatgggacaagtattccaacatgtattttagtatttaaaaaatgtcgccaacaagaagactatgtattatttatcgatgcatccaatgattttgaaaaaggaaaaaatcaaaaccatttaaccgatgcccaagtcgaacgcattattaacacatataagcgtaaggaaacaattgataaatatagctacagtgcgacattacaagagatcgccgataacgattacaacttaaacataccgagatatgtcgatacattcgaagaagaagcaccgattgatttagatcaagtccaacaagatttgaaaaatatcgacaaagaaatcgcagaagttgaacaagaaatcaatgcatacctgaaagaacttggggtgttgaaagatgagtaatacacaaaagaaaaatgtgccagagttgaggttcccagggtttgaaggcgaatgggaagagaagaagttaggggaccttactaccaaaataggtagtggaaagactcccaaaggtggaagtgaaaactatacaaacaaaggcataccatttttaaggagtcaaaatattagaaatggtaaattaaatcttaatgacttagtttatattagtaaagatatagatgatgagatgaaaaatagtagaacgtactatggtgatgttcttttaaatattacaggagcatcaataggtagaacagccattaattcgatagttgaaatacatgctaatttaaatcaacatgtatgtattattagattgaaaaaagagtattattataatttttttggacagtatctattatcaagaaaaggtaaaaggaaaattttccttgcacaaagtggaggtagtcgagaaggactaaacttcaaagaaattgctaatttaaaaatcttcaccccaactatatttgaagagcagcaaaaaataggcgaattcatcagcaaacttgaccgacaaattgaattagaagaacaaaaacttgaattacttcagcaacagaaaaaaggctatatgcagaaaatcttctcgcaagaattgcgattcaaagatgaggaaggtaaagattatccagattggaaatcaaaatcaattcaagaaatatttgagaataagggtggcactgctctagaaacagaatttaattttgacggtaattataaagttataagtataggaagttattctataaatagcacttataatgatcaaaatataagagtcaataaaaataaaaaaactgaaaaatatattttatcaaaaggcgacttagcaatggtattaaatgataaaacaaaagatgggaaaattataggtagaagtatatttatagataaagataatcaatatatttataatcaaagaactgaaagattaataccatttgctgaaaatgataataaatttttatggttcttaatgaatacagatttaattagaaataaaataaaaggtatgatgcaaggagcaacccaagtttatataaattattcatctattaaattgatatctatacaattgccacttcttgaagaacaacagaaaataagagggtttctagaagttttatctggaataactactaaacaattgcacaagatagaccaattaaaagagaggaaaaaggcgtttttacagaaaatgtttatttgatttgtcgctgcaatatagtttttattatttgtttatttcagatgtttcaccatcatattgcgtaacttttacaaataagaaataaagttcaatgaaatcaaaaacgaacattaaatttaggcactgtgatagcacagtgtcttttttgtgtcgaaattgtgtacagaataagtagttaaataaagattaagttgagataaagtgttattcgtaaataaaagagagtagatcgataggaattgaatgatattagttaactatttattaaattacttaataatgattaatttttagttaaagtaagtttaatgtgaagcacgaccattgctcattataatgaatgaggattgttcgtattgcgtaatagaataaatcaaatagactaaaaattgggagcatagaattatgaaattaaaaaatattgctaaagcaagtttagcactagggattttaacaacagggatgattacaactactgctcagccagtaaaagcaattgagcaaagcagattatcagttacttcaaaagatacacaagaattaaaaaaatactacagtggaacaggatataattttcaaaatgtgagtggttatagagaaggtaataaaatgaacattattgatggaccacaacttaatgtagttactttacttggcacagacaaagaaaggtttaaggacgatgaagattatgaaggacttgatgtatttgttgtaagagaagggtcaggtaaacacgcagataatatatcaattggtggaattacaaaaacaaataagaatcaatataaagaccctgtacaaaacgttaatttattgacttctaagagtaacggtcaaaatactgcttctgtgacttcagaatactatagcatcaataaagaagaaatttcattaaaagaacttgatttcaaactaagaaagcaattaattgataaacatgatctttataagacagagcctaaagacagcaaaattaaagtttctatgaaaaatggcggctactatacgtttgaattaaataaaaaattacagcctcatcgcatgggtgatacgattgatagtagaaatataaagaaaattgaagtgaatttataataatattcgagggagtatatcatgagagaaaattttaaattacgtaaaatgaaagtcggtttagtatcagttgcaattactatgttatatatcatgacaaatggcgaagcagaagcatctgaaggtagccaaactgttaagaacccaaaggtgaatgcaactgaagaaatcaaagttggatcacaaccagttcaaaataatcaagaagtaagttcggaacaaacaaaaaagaattttgttaatttagaccccattaaacctggtgctcaaaaggtaacagggactactttacccagccatattattctaatgaatatagatggtaaaagtgctgattcagtagatggaggaaatagtgatttagtatttgctgatgaaaacggaagattcgagtatccactacacaatagaaaaattgttcataatcaagaaattgaggtttcgtcatccagtcctgatttaggtgatgatgaagaagatgaagaagtagaagaagattcaactgaaaaagctggtactgaggaagaaaacacagatgctaaagctacatacacaacaccacgatatgaaaaagcgtatgaaataccgaaagaacaactaaaagaaaaagatggacatcaccaagttttcatcgaacctattactgaaggttcaggtattattaaaggtcatacgtctgtaaaaggtaaagttgctctatctattaataataaatttattaattttgaagaaagagctaaagatggaattagtaaagaagatactaaagctagttccgatggtgtttggatgcctattaatgaaaaaggatattttgattttgatttcaaaaaaaatccttttgataacttagagttaaagaaaaatgatgaaatctcattaacatttgcacctgatgatgaagatgaagcattgaagtcattaattttcaaaactaaagtaacgagtttagaagatattgataaagcagaaactaaatatgaccatactaaagtggaaaaagtaaaagtattgaaagatgttaaagaagatttacatgtagatgaaatttatggaagtttgtaccatacagaacaaggtaaaggtattctcgataaacagggaactaaagaaattacaggtaagactaaattcgcgaatgcagtagtgaaagtatattctgacttaggtgatgcgcaactgtttcctgatattcaagtagatgaaaatggtaaatttagctttgatgctgaaaaagctggtttcagattacaaaatggagaaacattgaattttgcagtagttaaacctattactggtgagctattacatcaaggattcgtttctaagtatatcgatgtttatgaatctccggaagaaaagaaagaacgtgaatttgaagagaaacttgaaaacacgcctgcatatcataaattacatggtgataaaattgtcggctatgatgttcaaggtaatccatcaacttggttctatccattaggtgaaaagaaagttgaacgtaaggcaccaaaattagaaaaataattaataaaataaaacagcttaatgatgtaatgaaactagtgagttaatcactgacttcaacgtcattgagctgttttttgtgctttgttacaaagcattattgagtttattttacgtgttcatattttgaaacatcaaagccgtcttgtttagctttgttgataatgtctttgattgaatgtagtcctttatcggcgaagtatgatcttaagttgtcttttgtagcttggtcagcattcttatctaataacacatcgatatagcttaattcatgttctaagaagtttgcatcatcatgtagtacaagtccattttgagaataaactttcgcatctgcttgattactatatccaacaacgccagttgctaaaacacctaccattgccgtagctactaaaacctttttaaatttcatatctatcactcctctaaaaaatgtaactctatcataacactgaatattgagaaaattacgtttattaagccgatttaataattttaataaatagttaaagtgacaaatattgtttaaatgcaattaatctttaatgcgatggttatggattttcctactaaaaccttgatttcaaagagggtttaaatcaaatgaaacaataataaaaaaatgacgcaacataataataagtacaaatttaattaagaaattaaattgattgtatatgtatattttggtaacgtaaaagagaaatatacaaaataattaattatttatatgaaaagagaatataaatgaagtataaaacagagagacgtgaaacgatgggatatttaaaagggtttgcattgtacataagtatcttaattttaatagtttttatagcaggttgtggcaaaagtgataaaacaaaagaagattcaaaagaagcacaaattaaaaagagctttgagaaaactttagatatgtatccaatcaaaaatctcgaggatttatacgacaaagaaggctatagagatggtgaatttaaaaagggtgataagggtacatggactttactcacaagttttgctaaaagtaacaaaccaggtgagatagatgatgaaggcatggttttatttttaaatagaaatataaagaaggcaacaggatattattacacgagcaaagttcatgatgaatttaatgaaaaagagcatcaaaaaaaatatcatgttgaacttaaaaataataaaatagttcttttggataatgtagaagattcaaagctcaaaaataaaatagaaaattttaaattctttagtcagtacgctgattttagagattttaaaaactataaaaatggaaatatatcaagtgcagataatgtaccaagtttcgatgcagaatatcaaataagtaatacggataaaaatgtaaaaaaacttagagaggtttatccaatcacaacaaaaaaatctccagtattaaaattacatatagatggtgacataaaaggaagttcaattggatataaaaatatagaatttaatttttcaaaagtaaaagacgaagaaacagctgttagagattttgtgaattttggaccatctgatggagttagctaaagataattagatgtagaaataattctaaaacagagagacgtgaaacgatgggatatttaaaaaggattggaatgtgtataagcctgttgattgtaatcatttttgtaacatcttgcggtggtggtaataaaatcactggagattcaaaagaaacacaaatcaaaaagagttttgcgaaaacgttagatatgtacccaatcaaaaatcttgaagatttatacgacaaagaaggatatcgagatggcgaatttaaaaaaggtgacaaagggatgtggacgatatacacagatttcgctaaaagtaataaaccgggtgaattggatgatgaaggtatggttttaaatctggatagaaatactcgaacggctaagggatattattttgttaagaaattttatgaaaaggataaattacctgatagaaaaaattataaagttgaaatgaaaaataataaaagtatcttattagacaaggtagaagatccaaatctaaaaaagagaatagaaaactttaaatttttcggacaatatgcaaattttaaggatttggaaaattacaacaatggcgacgtgtcaataaattggaatgttccaagttatgacgtggaatataaaatgagcaataaagatgaaaatgttaaacaattaagaagtcgttataacattcctactgataaagctccaatgttaaaaatgcatattgacggggacttaaaaggtagttctgttggatataaaaggttagaaatagatttttcaaaagaagatagggatatttcagtcattgattatttaagttataagccagcgaaaaaatagtactgataattaaatattagggtgtgaaggaatggaatatctaaaaaggcttgcattgttcataagtgttattattttgaccatttttataatgggttgtgatagtcaaagcgatactgcagaaaatccaaaagaaggttcaaaagaagcacaaattaaaaagagtttttcgaaaacgttagatatgtatccaattaagaatctcgaggatttatatgacaaagaaggatatcgtgatggcgaatttaaaaaaggtgataaagggacgtggacaatatcaacagattttgctaaaagcaacaaaccaggtgaaatggatagtgaaggtatggtgctacatttgaatagaaatatgaggacggcaactgggcattatactataagaacaacttatgatgaattgggtaagatgacacgcgaaaaaaattatcgtgttgaacttaaaaataataagatagtagttttagataaagtagaagatgtaaaccttaaacataaaattgaaaattttaaattttttagtcagtatgcagattttaaagatttgaaaaattataaaaatggaagaatatctatcaatgaaaatgttccgtattatgaagcagagtacaaaaggaataatagtgatggaaatgtaaaaaaacttagagaaaagtacccaattacaaccaagcagtctccaatattaaaactgcatatagacggagatattaaaggtagctcagttggatataagcagatagagtacatgttttctaaggagaaagaggatgagacttttatgagtgattttttgaacttcggaccatcacatagtaattagtaaataaaaccaggggcataaactaatttaaaacaagagagaagtgaaaagatgggatattttaaaagagttttactttatataattgttatggttttgagtgtttttataataggttgtgataaatcaagcgatacttcagaaaaatcaaaaggagattcaaaagaagcacaaattaaaaagagttttgcaaaaacgttagacatgtatcctactgaaaatctagaagacttttatgacaaagagggatatcgagatggaaaatttaaaaaaggcgacaaaggtacttgggttattagatctgaaatgacaacagaactgaaaaatgaaaatatggtatctaaaggtatggtcatacgtttaaatagaaatagtagaacatgcactggtgaatattttgtcaggatagttaaagaagacagtgagggcaaggtatatagtgatgaacgaaaatatccagtgaaaatggaaaataataaaatcattccattaaaaccaatcgatgatgaaaaagtaaaaaaagaaattgaagaatttaaattctttgtacaatacgggaatttcaaagaattggaaaactataaagacggagaagtgacatataacccagaagcaccaatatactctgcacaatatcaattgaaaaacagtgattacaatgtagaacaattacgtaagcgatataatatcccgacgcaaaaagcgcctaaattattattgaaaggctcaggtaatttaaaaggttcatcagtcggatataaaaatattgaatttacctttgttgaaaacaaggaagaaaatatttacttcacagatagtgtctactttaatccaagcgaggataaataagtataattattattataaaaaatgacgttagaacatttaataataaagttaaatgaattacatgtattaaattgaataagttagttttgtttgataacataaaagttgaataatcactattttaataagttatatgaaatattcaaatgtttataaaattaaagcagagagatgtgaaatgatggagtatataaaaaaaattgctttgtacatgagtgtattacttttaatcatttttattgggggatgtggaaatatgaaagatgaacagaaaaaagaggaacaaacgaataaaacagattcaaaagaagaacaaatcaaaaagagttttgcgaaaacgttagatatgtatccaattaagaatctcgaggatctatatgacaaagaaggatatcgagatggtgagtttaaaaaaggtgataaaggtatgtggacgatatatacagattttgccaaaagtaataaagcagacgaattaagtaatgaaggtatggtcttatacttagatagaaatacacggacagcaaagggacattattttgttaagacattttatgaaaaggataaattcccagatagaaaaaaatataaagttgaaatgaaaaataataaaattatcttattagacaaggtagaagatccaaaactaaaaaagagaatagaaaactttaaatttttcggacaatatgcaaaccttaaagaattgaaaaattacaacaatggtgatgtctcaattaatgagaatgttccaagttatgacgcaaaatttaaaatgagcaataaagatgaaaatgttaagcaattaagaagtcgttataatattcctactgataaagcaccggtattaaaaatgcatattgatggtaatttgaaaggaagttctgtgggttataaaaagttggaaattgacttttcaaaaggtgaaaaaagcgatttgtcagtaatagattcattaaatttccagccggcgaaggtggatgaagatgaaagataaatacaaaatagatccaggacctattaaatataatactgaggaaactacagctatttctaaaataagttatgaaattgaaaatgcgaaattatatggaattaaaagtaaaacaataggtagacaaatagatcaattaaaagaagcgaaaaaattcccttctaatcttgaatatgttgatagttatactgattctcttaatggagtaacaacttctgcttttttaaataaagatacaggcaaagtaactcttgggatgactgggactaatatacaaggcgaagcctttaaaaagttaaaagaaggtgaattttcaagacaaaattttaccaatgctttggaaacagttaaagatggatatgcagatcttaaaatattatattctcctgcatctgatcaaaactatagatatgcgaatacgcaagaatttataaataaaataaaaagtaagtatgatattgattttattactggacattcactaggtggaagagatgcggtagttctaggaatgagtaatggtattccgaacattgtggtttataatccagctcctatttctataactagtttgaatcctaattccccagatggaaaacgattgttagagttatataaaaattataaaggtaatattactaggtttgttgcagaaaatgatgcattgacagaaaatctgaagaaatataagcattatgtttttttcggtaatgataaagtctttaaaaatggtaaaggtcatgaaatggaaggctttctgaccgaagaagaacaaaaagctataaaaaaagaacttaaaaaactacaaggttatgcagaagaaaataataagtcatttgtaaagcattcaaataatgctatctctaaattagctagtatagaattacttagagcaaatatgatgactacaaatggaggaggattatcttcttcgcagcaaaaagttttagaaagtttaacagctttaacaattgcgcagtcattcagtcaactgatagacgatgaaattaatcaaatcaaaaaaatgtataatgaaaagaaaaagaaatttggaaaaaattgggaagacgctcaaaaagctggaaaagctgtaggtgaagatttgagtgtaaatggagttctcaatgctttagatgaaggtcaagtgaatgaaagtagtatggtaagagaacctgaacaaatgatatctgcaaaagaaagacaactttcaacgatagggtcttctgtatcaaattatattatgagagttagactcagtattaatgaaatcgttgataaagatcaagtgcttgcatcacaaataggtggattactatgatgtttaatcaaattaataataaaaatgaattagaagaatcatatgaatctgagaaaaaacgtatagagaatgaactgcaaaatttaaatgaacttaggcatagaactcgaaaagaaaatgaacgtagttatgatgtttttcaatatttgaaacacgaaatgaattatagtgaagatgcacaaaggaaaatgacgagaaatatagaagcgtatgagcaagaaatcaatgagataattagaaagcaagaatggaaattagaagaatataaagaagacttaaaaaagtcttatgaaaagcagttagataaactaagtgactgataatttggaggagattaaatgactctaatagaaccagatatgaccttaagaatgccagatataagtactacagtagaaacacttaatctcatatctaaaatgaatgctcaaaaagaaaacattcgttcagttgttgcacctgaacataagcataaatataaagatattgaaaatggattaaaaggtgaagaaaaagtattaattgaacaaatggcgcatcattgcgaggcttttaaagctaattttaaaggcgcggctcaaggagattgggttaaaagtgccatgtctgagatagacagcattaaggatgacctgaaaaaaattaatagctaaactacatatcgtactactaaataaagcgaccaatgttcagtgtattcacaactgacactaggccgcttctttttattttattcccatgtgaagtaattcgaactgaatcgaaatatcacacttacaattgtaaaaacacaacttaaattactgtcccgcattaaacatatccaaattccaaacagcaacaacaaaatcctcaagtaccaaaagctatgacctctttatcaaaatcaacgcaagtcaaactctctcgaactatccgccataaatcatcctcaccttacaaaccataaagcgctgcagttaagtattgaatggcatagccaattgaaatgaaaatagcaatcgttataatagcactgccaatggtatataaagtatgtttcgtagataatccttcagtctttgaaccaaaaacactgagtagaataaatgtaataccaatgatatataaaactaaaatgacaaatagcatgtttatacacctcgattctctctcgtgagatatatctttgtctccattataaagtaaagtgctcaataatttaattaagtatactatttttttattatcgaagattgcgaaagaggaaatgctcctatataatgtaaaacggaattattcctatttgcaaacgaacgaaacaaataaattgaagtgagggtatatatatggctaaaattccagttacggtattaagtggttatttaggctcggggaaaacaacgttgttaaatcatattttacaaaatcgagaaggtcgacgtattgcggtaattgtaaatgatatgagtgaagtcaatatcgataaagatcttgtcgcagatggtgggggactatcgcgcacagacgaaaaattagtcgaactttctaatggttgtatctgttgtacacttagagacgatttattaaaagaagttgagcgtttagtgaaaaaaggtggcatcgatcaaattgttattgagtcaacagggatttcagagccagtacctgttgcacaaactttctcatatattgatgatgaacttggcattgatcttacagcgatttgccgtttagatacaatggttacagttgtggatgctaaccgcttcgtacatgacatcaactcagaagatttattgatggatcgtgatcaaagcgttgatgaaacagatgagcgttcgattgctgatttattaattgaccaagttgaattttgtgatgtattgattattaataaaattgatttaattagtgaagaagaacttgcgaagttagaaaaagtgttaagtgcattgcaacctactgctaaaattattaagacaataaattctgaagtggatttaaaagaagtcttaaatacgcagcgttttgattttgaaaaagcgagcgagtcagcaggatggatcaaagaacttgagtctggtgggcatgcatcgcatacacctgaaacagaagaatatggtatatcatcgtttgtatataaacgtcgacttcctttccatgctaaaaggttcaatgattggttagaaaccatgccaaataatgtcgttcgatcaaaaggtatcgtatggctagcacaatacaatcacgtagcatgtttattatctcaagcagggtcatcttgcaatattcatccagttacatattgggtggctagtatgtctgaagcacaacaaacgcaaatattagcagaacgccaagacgtcgcagctgaatgggatccagaatatggcgatcgtcatacacaatttgtcattattggtaccgacttagatgaagaaaaattaacaaaagaactcgatgcatgcttagtcaatgcgcaagaaattgatgcagattggcaacaatttgaagatccatatcaatggcaaattagaccagcacgataagttgaatgaagtataatcatttttaaattgtggcttaattgtttgcaatttatgacaattaataaaaagttaagatgttcttaggatctttttgttttcaatctatctaaagtgtgatagttttgataaagcagaaatttgcattttatccatagggctaggacatgtatatgtcttagtcctttttatgtttgctttgatgaaaaatggcaaaaccatcgtaccaactgttaattgaaggtacaatcattgtttaacagtcataaaaatgagtgaagtaaatgcagctatcaatgtactattaacacttacggtcacacgagtgtttcagtctaaacgtgcaacgcaattctgcacgtggccaatatatcttgggatagattatgaaaatcattaagatttcgtatgccaaatcatgaatgtctcagacctcgagtatcaaacataaaacacgccacaaaaatataacgcgtcagactacaaagatcacgaatattccgtacgtcccaccaagaacatcctatacaaaaaaccaagaccatttatttgcaacaaactaacaagactcacctcacatcaataaatcaacacaaagcaaagccaccatccctattggtatagtggcctgagaattttaagtattcaattcgcttaaattattttgcgaaaatgtcgataattgctttgatgattttaatgatagtacctacaatagccatcgttttgtcctcctgtatgttgatttaacatagtgatgagttgttgatcgttaatgtttgagattagttgttacctaaaaatttaccaagtaaatctttaaagaatttgaataattttgctacgaattccatgtgaatggcccccttcaaataagatgttcatatctatgagatttttataacttacttaccagtgaatttctcaattaatcctttaatgaatttaatgattcctgcaatgatacccatgtgaaagacctcctttgtttgttatgaaatcttatttaccagtgaattgttcgattaagcttttgataactttaatgatgccagcgatgatacccattaagattacctcctttgcttatgagttaacttcattgtacatagttatcttgtgcgtaattgattttttttcctaacttgaattgttatgatcataactgcgaattttttattttaaaaggacgggaaatactgcctaactgtacaggtgcatttacaaaatctttacaatcattggtttaatagaggttaagctcatgaatttgacatgaagcagaaatttaattatattttatgttataagtttaaaacgaataacacgttaggtctcgtctaggcaaagcatatttatgaagatgaattgaacagacagaagtaacattttatatacatatgtgcatgggagcacgcttaaagagaacaatgcaacaaggtatatcaacgtaccgtgatgcagtgtctagttaaactgaaacctgcaatagtaaattttctgccattatgtacagaatctactattgtaggtttttattttatacataagcaattatgcgagagattagaaataaggaggttatgcagtgttaagttttcaattgctattttcactgtttgttattgcgcttatcattgcattgataagtggcttgttgtttttagcaccagttatgccaatgagatatattaaattacatttatacatactagtcatgccagtattatttgcagtcattggctttttcggtattcatggtcaacatgtcttaggtccatttaaaatagatcgtttatcttggttattagctggctttgtaatggcgcttggttttattattcaaaagttttcaatgcgatatttactaggtgatcatcattatagacattactttccattgttcactgcgattacgtcgtttgcatctttagcatggatgtctgaagacttaagactgatggcactctgctggggtatgacattattatgtttaacattgctgatgaacgttaatcgtttttggaaagtgccacgtgagtctgcgaaattatcaagtatgacatttttatgtggttggcttgcattcgttggagcaattgtaactatttatattgcgactggcgagtggcgcgtgcctcaacatatgtctaattcgacatggtcattgttgacgaatgtactacttgtattagctgtcatgataccagcagcacaatttccatttcatcgatggttgattgaatctgtaacagcaccaacgccagtatcggcaattatgcatgcaggaattgtgaatgcaggtggtgttattctaactcgttttgcgccgatatttgataatggatttgcgttatcattattacttatcctttctagtatttctgtattgttaggatcgggtattagcttggttcaagtggattacaaaagacagttagtcggctctacgatgagtcaaatgggctttatgttagttcaatgtgcattgggtgtatattcagcagcgattattcatttaatattgcacggtatttttaaagcaacattatttttacaatcaggttctatcgtgaagcgattcaatattccaaaacaagcatctgctaaagacgcttatggctggattgtcatgggacgtgtattagctattatcgtggcatttctattttggatgagtagtgacagaagtgcatatgaagtgttaagtgcactcattctagcatggtcattacttgtatcttggaatcagatggtagcctttagtaaagggcgcatggcacgtctggttggcatgattttgattgcaattgtgacatttatctacgtcatcacacacaattatttttacgatgtattacaaaatataacaacacatgcgacaacgccgcctacagtgagtgtcatcattagtgttgtcattttaatatttggtagtttattaagtatttgggtggcgcgtcatcgatactctaagggttttgcggtattgtacgtgtggttagttaatctaggtgaagcacgctcgaaagcgatagaaagtcatccgaattatttgaagaagtatttataggaggtgaaaggtatgacaacacagttaaatatcaattcagtcattgaaaatgcgaaacgtgttattacaccattatcaccgatttcgatttttgcagcacgaaatccatgggaaggattagaagcggatacgtttgaagatgttgcaaaatggttacgtgatgttcgagatgtggatatttttccaaataaagcattaatagaaagtgctgtggcacgtggtgaattagacgaaagtgtctttaatcaacttgttactgatatgttacttgaacatcactacaatatcccgcaacactacatcaatctttatattgataacattaaaacattaaaagacgtacctgcatcatatatgaatcattcaaatgttgatgttgttgctgatctactattagaaaaatcaaaacgtgatatggctgattcatatcatcactatgatgtacgtccgatgagtgatgcaataatagatgaacaaggtgagccacttagcgaacaagtgaatcgtcaaatgattaaatggacgaaactttatatcgatcaatttctatcgagttggacaatgccgaagcgtgagcaaagtttttaccatgcatggttgcatttagcgcaacatgatcatagttttactaaagcacagcgccaagtgattaaaggcttgcccaatgatcctaaaatgacgatagagtcagtattaactcatttttcaatagatcaggaagactaccaagcttatgttgaaggacatcttttggcgttaccgggttgggcaggtatgttgtattaccgttcacaacagcatcactttgaacaacatttgttaacggattatttggcaattcggttagttgtcgaacaattgctagttggtgatgagtttaagtcagtcactaaagattgtgaaagtagatcggaaaattggtttaagcaaactgttgcatcatggtgttactacagtgatatgcctagcgatgtattactacaacatgacgtcaatgaaattcaaacgtttattcattttgcagcaactatgaataaaaatgtatttaaaaatttatggctaattgcctgggaaatgacatacgaatctcagttaaaacaaaaaattaaagcaggtcatgaaagtgtggcgggcgcattagatgtaaaccaagtaaatgtctcagaaaatgataacgctaatcagccacattcagtattattaaatgacacacaagcagttgatgaaaataatagcgagctaaatcaggtgggcacatcaacgaaagcgcaaattgcattttgtatagatgttcgttcagaaccatttcgtagacatatcgaagcagcagggccctttgaaacgattggtattgcaggtttctttggattacctattcaaaaagatgccgtagacgaacaattcaaacatgattcattacctgtcatggtaccgccggcatatcgcattaaagaatttgcagaccgctacgatatgaatgtttatcgacaacagcaacagacaatgtcatcgatgttttacacatttaaattgatgaaaaataatgttatgcctagtctgttattgcctgaattaagtgggccatttttaagcttgagtaccattgtcaattcgattatgcctagaaaaagtcgcgcgtctttacaaaaaataacacaaaaatggttgaaaaagcctgaaacaaagttaacgattgatcgtgagtttgaccgaacatcagacttacctgttggatttactgagcaagagcaaattgatttcgcgttacaagcgttgaaattgatggatttaaccgaagcatttgcgccgttcgttgtgttagcaggtcatgctagtcattctcacaataatccacatcatgcatcacttgaatgtggggcttgtggtggcgcatcaagcggttttaatgctaagttattagcgatgatatgtaatcgtccaaatgtcagacaaggattaaaacaatcaggtgtgtatattccagagacaactgtttttgcggcagcagaacatcatacgtctactgatacgttggcatgggtatatgtgccagacacattatcttctattgctttagatgcatatgaatcattgaatgacgcgatgccgatgatttctgaacacgcgaatcgcgaacgtttggacaaactgccaacgattggtcgtgtgaatcatccagtggaagaagcgcagcggtttgcgagtgattggagtgaggtacgtccagaatggggcttggctaaaaatgcatcatttataattggacgacgccaattaacaaaaggcattgatttagaagggcggacatttttacacaattatgattggcgtaaagataaagatggcaaattgttaaatactatcatttctggtccggcgcttgtggcacaatggattaatttacaatattatgcgtcgacagttgcgccgcatttttacggaagtgggaataaagcgacacaaaccgtcacgtcaggtgttggtgtcatgcaaggtaatgcgagtgatctgatgtatggcttatcatggcaatctgttatggctgctgatcgaacgatgtatcattcgccaattcgtttgcttgtcgttgttcaggcacccgactatgttgtagcaagactactcgcgaataatgaccatttcgctaggaaggtgtctaatcattggctgcgtttaatgagcgttaatgaggaagggcgttttaaaagttggatttaacgatgatatgttgcgatgctaagtaactaatatatcatcatatctacaatgttctagcttcttaaaatatactaaaaatgataaacttaatgtaatagttgatgtcgtgataacgatacaaagatgaagtaatcaattttaatattattggagttagtgatatgaaaagaacgaaaggtgaaatcgaagctgaaatcagtaaagccattacgcaatgggaaaaagatttccttggcagaggttccttgtcagttaaatcagacattttaagagatatggtgattattagtttacaaggtatcttaacgccagcagaatatcgtgtgtgtagtacgaatgaaggattactaaatattaaacgaacacgttctgaattagttgaatccggtgagcaagatttgaatgatatcatttttaaaattacaggtatcaaagtgatgagcttccatagtgatttaagtacagttacaggtgaacgtattatcgtattcaaacttgaggataatttggaaaagcatatttaagaaggttaggtatgcttttgctggcttattaaagctatagaagtatgcttggttaaacagcgcaacgccatatatttgggtgtgctgtttttctattacatgatgtgtttattacgtggatgaatgcgtgggtctgaatatagcccgtgaaaggcgtatgtcataaaatttgcgaatggtgacaagtcgacgcaagcatatttgttgcgagacatgcccactatccttttacataaagagtatatgtgtgacgtaggcatataatcgataaagtattcctaaaaaattaggtataatgaccattgttgcaataagtttttcggccttgaaaccgataacgcatagtataataggaataaaatataatacaaatatccagtaaatcaaatttgaaaacgatggatgaataggggtaaagaatctaactaatgtaatgattaacgctatatagacaaaaataactctattgatacgccttaccccctctgtataataaatatagatcgtactaaattgaaaatagcaaaatattgttatttcaattatacaatgttttatttgcaatatacataacaatatgaactttataattttgatattgtcggtaaagtgaaatttgtggcacattgatattatggataacatttgtaaaatgaaaatgatgatacgaggagattgtaagatgatagataaaaaattaacatcaccgaaaatgacagtgcctttatttttaatcgcgctgattgtatttataggtatgttttacagtgtagtgacaaatcaagaatggcttaaaaatatagatatgggatcattaacatggtttacagattatttcggtgagccacaacgtcagtatgttaacaatttatttaattactatatgacgtttagtgcggaaattggagatgtcaaaggtgtcgtgttgatttccattatcgtcacaatcatactgtttattaaacagaggcatttagcggtttggtttgtgacatatttggtttcaggtgtcatcatgaacaaattaattaaagatactgttttacgtccaagaccatataatcatttagccgttgatacaggcttttcatttccaagtggacattccaacgccagcacattattatatttcgctttaatgatcataattatttcacttgctgctaagacaataacaaaagtgttgagtgcgctagttatgggaatattatggcttagcatattattttgtcgcctttattttcatgcgcattacttttcagatgtcattggcggcacgtcactagcaatcatttgggtagcgttattcttaatggtatacccatactttattaatcatcgacgacaacgcgtttagcaaacatctttagacatagtggaggtatatagaaaaatgagaattaaaacaccgagtccctcttatttaaaaggcacaaatggacatgcgatattattattacattcatttacaggtacaaatcgggatgtgaagcatcttgcagctgagttaaatgaccaaggatttagttgttatgcaccgaattatccaggtcatggcttactgttgaaagatttcatgacatataatgtagatgattggtgggaagaagttgagaaagcttaccaatttttagtcaatgaaggttatgaatctatcagtgcaacgggtgtgtctttaggtggattaatgacattaaaattggcgcaacactatcctttgaaacgtatcgctgtcatgtcagcaccaaaggaaaagagtgacgatggtttaatagaacatttagtttattatagtcaacgcatgtcggatattttaaatttagatcagcaagcatcgagtgcgcaattagcagcaattgatgattatgaaggtgaaattacgaagtttcaacattttattgatgatatcatgacaaatttaaatgttattaaaatgccagctaatatattatttggtggtaaagatgcgccatcctatgaaacaagtgcacattttatttatgaacatttaggatcagtagacaaagaattaaatggtctgaaggattcgcatcatttaatgacgcatggagaaggcagagatattttagaagaaaatgttattcgctttttcaatgctttaacataattgaagattttaaaaattaacacttgagtgacgatgttattatatttgtcatttgagtgttttttgtggcgtgatagtatagggaacttagctaaagttaatttttagtgtgatgtcgtggaaatattatggagttataccagaagttgatttgtattgtaatgttgtgggcattttatgggcattgcacctgaagttgttatgtggcgagatgttggggatatagatggtgttgtatgtggcgagatattggcgcacgtatacagcgttgaaccaggaattttaatgtagcgtaatgacaacacattacaagagttgactatattatgataaatccaggcgctaccgtattaatgaaacaattttgatgcaggtgtattgcatgttatttacatacatgttagagtgttacttaaacacgtagacgctttaacgctttaaaggagatgtgaatgatgaaaagacaacaatcacaatggaagtcatcaactggatttattttagctagtgcgggttctgcaatcggtcttggtgccatgtggaaattcccatatatggcagggatttatggcggcggtgcctttctagctatgttcttaatattcaccatttttgttgggttaccattactcattatggaattcactgttgggaaaatgggacggacatatacaacacaaatatatagtaaattaactggtaaaaaatggctcaatatcattggctggaacggtaatttggccgtgtttattttatttggcttctatagtgttatcggtggttggattgtcatttacatcggacaagtattatggcaattagttatatttcaacgcatcaatcatctccaagaaatgaattttgaagcggtaatatcaaatccttggttaactgttctagggcaaggtatattcatattcgctacgatgattattgtcatgttaggtgttgaaaaaggattagaaaaggcatcgaaagttatgatgccattgctgtttgtctttttaatcatcattgtgattaagtctttaacattagatggcgccttagaaggtgtgaaatttattttacaaccaagagtgtcagagattactgctgacggtatcttgtttgcgctaggccaatcattctttacgttatcattaggaactacaggtatgattacttatgcgagttatgcctctaaagacatgacgattaagtcatcagctatttctatcgttgttatgaatatctttgtatctgtattggcaggtctagctatatttccggcgttacatagttttggctatgaaccacaagaagggcctggattattatttaaagtactgccaatggtctttagtcaaatgcatctaggcacattattctatttgggattcttagtgctgttcttatttgcggctttaacgtcatctatttctttattagaattaaatgtttctaacttcacgaagaatgacaatacaaaacgtaaaaaagtcgcagtgatcggtagtattttagtatttatcattagtattccagcaaccttatcttttggtatcttaaaagatgtaagattcggtgcgggaacgatttttgataatatggatttcatcgtttcgaatgtattgatgccattaggcgcattaggtactacgcttgtcgtaggacaattattagataaaaaattattacaacaatattttggtaaagatcgatttagattattcagtggttggtattacttaattaagtatgcgatgcctgtcgttattattttagtctttatcgtgcaattatttagttaatatatagaagcatctgacacacaagtatttgtgttgctcaggtgtttttttgtttggaattgaaaagttagtactggttctgaattaatcgaaacttagataattgcaaaataacaaaatgtcgtttataattcttatctgaaaagtaagaattaaaattgagacatgaagaaaggtttcattcatttgatcggcatgtcagatgagggtgcatctatgattacttatgatttaattggcaatacaccattagtactgttagaacattatagtgatgataaagttaaaatttatgccaagcttgaacaatggaatcctggaggcagtgttaaagacagactcgggaaatatttagtagagaaggcaattcaagaagggcgtgtgcgtgcaggtcaaactattgttgaagcgactgctggtaatacaggcatagggttagctattgcagcgaatagacatcatttaaaatgtaagatctttgcgccgtatggtttttcagaagaaaagattaatattatgatagcgcttggtgcagatgtttcaaggacgagtcagtctgaaggtatgcatggggcacaattagctgcacgttcctatgctgaaaaatatggtgccgtttatatgaatcaatttgaatccgaacataatccggatacatattttcatacattgggacccgaattgacttcagcattacagcaaattgattattttgtggctggtattggctctggcggtacatttacaggtaccgcacgttatttaaagcaacatcacgtgcaatgttatgccgttgagccagaagggtccgtgttaaatggagggccagctcatgcacatgacactgaaggtatcggttctgagaaatggccgatatttttagagagacgtcttgtagatgggatatttacgattaaagatcaagatgcctttcgaaatgtcaaaagtttggctataaatgaagggttgttagtaggcagttcttcaggtgcagcattacaaggtgcattgaatttaaaagcgcaattatctgaaggtacgattgttgtcgtatttccagatggtagcgatcgatatatgtctaagcaaatatttaattatgaggagaatgattatgaataagaaaactaaattaattcacggtggacacacaacggacgactatacaggtgcagttactacaccaatttatcaaacaagtacatatttacaagatgatattggtgatttacgtcaaggatatgaatattctcgtactgcgaatccaacaagaagttctgtagaaagcgttattacggcattagaaaatggcaaacatggctttgcgtttagttcaggtgttgcagctatcagtgcagttgttatgctgttggacaaaggtgatcatattattttaaattcagatgtatacggcggtacttatcgcgcattgacaaaagtatttacacgatttggcattgaagtggattttgtagatacaacgcatacagattcaattgtacaagcgatacgcccaacaacaaagatgttgtttattgaaacaccttctaatccattattacgtgttactgacattaaaaagtctgctgaaattgcgaaagaacacggtttgatttcagtcgttgataacacatttatgacaccttattatcagaatccattagatttaggcatcgatattgtcttgcattctgcaacgaaatatttaggtggacatagtgatgtcgttgctggtttagttgcaacatcggatgacaagcttgcagaacgtttagcatttatttcaaattcaacaggtggcattttaggacctcaagatagctatttacttgtgaggggtattaaaacattaggtttacgtatggaacaaattaatcgcagtgttattgaaattattaaaatgttacaagcacatccagctgtgcaacaagtgttccatccaagtattgaaagtcatttaaatcatgatgtccatatggctcaagcggatggccatacaggtgtgattgcatttgaagtgaaaaatacagaaagtgccaaacaattgattaaagcaacatcgtattacacattagctgaaagtttaggtgcagtggaaagtttaatttcagtacctgcattgatgacacatgcatccattccagcagatattcgagctaaagaaggtattacagacggacttgtaagaatttctgtaggtattgaagatactgaagatttagtcgatgatttaaaacaagcactagatacgttataaataatagcagcactggcatatattttgagttcaacgtttgttgttcttgaatatgctagtgctttttttgtgcgatgttaatcattcgtgattgagttatggaggtttggtggacatttgtatggatttaatttgataaatgtcatagtagtctcacaattcgtcattgtcacatgaattgcttattttttaattttttagaaaattcggcaaattgtattgacgatatatgcaattttacatataatgcttttattcctagtggaatgataagaatttgaaggagggggctttgcatgattgagtttcgacaggtaagtaagacctttaataaaaagaagcaaaaaatagatgctttgaaggacgtatcatttacggtcaatcgcaatgatatttttggtgtgattggatatagtggtgcaggaaaaagtacgttggtaagactcgtgaatcatcttgaagctgcctcgaatggacaagtgattgtagatggacatgatattacgaattatagcgataaaatgatgagggatattaagaaagatatcggtatgatatttcagcatttcaatttattaaattcagctaccgtatttaaaaatgtagcaatgccactcattttaagtaagaaaagcaaaacagaaattaagcaacgagtaacggaaatgcttgaatttgtaggattgagtgataaaaaagaccaatttcctgaagaattatctggtgggcagaagcaaagggtggctattgcaagagcgcttgttactaatccgaaaatactcctatgcgatgaagcaacaagcgcattggatccagcaacgactgcttcgatattgacgttattaaagaatgtcaatcaaacctttggcattacaattatgatgattacacatgaaatgcgcgttattaaagacatttgtaatcgtgttgctgtaatggaaaagggtcaagtggttgaaacaggaactgttaaagaggtgtttagtcatcctaaaacgacgattgctcaaaattttgtgtctacagttatacagactgagccaagtacatcattgattcgtcgattgaatgacgaacaagttggcgattttaaagattataaaatcttcgtcgaggaaactcaggtgacacaaccgattataaatgacttgattcaaatttgtggcagagaggttaaaattttattttcatctatgtcagaaatacaaggtaacaccgtatgttatatgtggcttcgatttaatatggatcaacaatttgatgacacggcaataaatcaatatttcaaagagaaaaatattcaatttgaggaggtgcattaacatatgtttggttctgatttagacagtgcacagttattacaagcattgtacgaaacgctatatatggtatctattgctttatttttaggagcagtgattggtattccattaggtgtcttattggtaattactcgaaaacaaggcatatggccgaatatagtgatacatcaagttttaaatcctataatcaatattttaaggtcactaccatttattattttgttaattgcgattgtaccattcacaaaattagtagtaggtacttcaattggtacgactgctgccatcgtgcctttaacagtatatgtggcaccttacattgcaagacttgttgaaaactcattattagaagtagacgaggggattattgaagcggcgaaagcgatgggcgcttcaccactacaaatcattagatattttttaattcctgaagcgttaggttcattagtattagcaattaccactgcgattattggacttattggaagtacggcgatggcaggagctgttggcggtggtggtataggagacttagctttagtgtatggttatcaaagatttgatacgacggtcattattattaccgttattgtattagtcattattgtccaagtgattcaaacgctagggaatgtcctagctagattcatacgtagacattaatgatatatagtgaagattttgaaaggaattgatagaatgaaaagattgattgggttagttatcgtagcacttgtattattagcagcgtgtggtagtaacaatgataaaaaagtaacaattggtgtcgcatcaaatgacactaaggcttgggagaaggttaaagaattagctaaaaaagatgatattgatgtggagattaagcacttttccgattacaatttaccgaataaagcattaaacgatggtgatattgatatgaatgcattccaacattttgcatttttagatcagtataagaaggcacataaaggaacaaagatttcagcattgagtacaacagttttagcaccgttgggcatttactcagataaaattaaagatgtcaaaaaggttaaagatggtgctaaagttgtcattccaaatgatgtatcaaaccaagcacgtgcacttaaactattagaagcagctggtttaataaaactgaaaaaagatttcggattagcaggtacagtgaaagctataacgtcaaatccaaaacatttaaaaattactgcagtagatgcacagcaaactgcgcgtgctttatctgatgtcgatattgcagttattaataacggtgtagcaactaaagcggggaaagaccctaaaaatgatccgatatttttagaaaaatcaaattcagatgctgtaaagccatatattaaaattgttgcagttaatgacaaagacttggataacaaaacatatgctaaaatcgtagaattgtatcattcaaaagaagctcaaaaagcgttgcaggaagatgtcaaagatggagagaaacctgttaatttatctaaagatgagattaaggcaatagaaacgtcattagcaaaataaattatattgcgtcctacaagcaaagttcatgcttatgtttgtagggcgttattgttggagaataaaattatttccaatagagaaagggattgtaatcattttatagtgaaatattatgaaattgtaataatttagatattgtaaaatctaataagttgtaataattttaagggctaattataaaatttgatgatacagtatatgatttttttgtaatcataatgtcatcaaacatcaacctattatacataataaaatcgtataatgatgtagtattcataaattcggataaaagaatgttaggaaagttaagcaagaggaggattttaaagtgcaaaaaaaagtaattgcagctattattgggacaagcgcgattagcgctgttgcggcaactcaagcaaatgcggctacaactcacacagtaaaaccgggtgaatcagtgtgggcaatttcaaataagtatgggatttcgattgctaaattaaagtcattaaacaatttaacatctaatctaattttcccaaaccaagtactaaaagtatctggctcaagtaattctacgagtaatagtagccgtccatcaacgaactcaggtggcggatcatactacacagtacaagcaggcgactcattatcattaatcgcatcaaaatatggtacaacttaccaaaacattatgcgacttaatggtttaaataatttctttatttatccaggtcaaaaattaaaagtatcaggtactgctagctcaagtaacgctgcgagcaatagtagccgtccatcaacgaactcaggtggcggatcatactatacagtacaagcaggtgactcattgtcattaatcgcatcaaaatatggtacaacttatcaaaaaattatgagcttaaatggcttaaataatttctttatatatccgggtcaaaaattgaaagtaactggtaatgcatctacgaactcaggatctgcaacaacgacaaatagaggttacaatacaccagtattcagtcaccaaaacttatatacatggggtcaatgtacatatcatgtatttaatcgtcgtgctgaaattggtaaaggtattagtacttattggtggaatgctaataactgggataacgcagcggcagcagatggttacactatcgacaatagacctactgtaggttctatcgctcaaacagatgtaggttattatggtcatgttatgtttgtagaacgtgtaaataacgatggtagtattttagtttcagaaatgaactattcagctgcaccaggtattttaacttacagaacggtaccagcttaccaagtaaataattatagatatattcactaaagtcttacgtatataaatatataatgaattcctattacatttcacaagctgaaaagttggattgaatcctaaactttatggcggggctatcaaagtcgtgattgttgtaataggaatttttgtataagaaaaaggattggtcgaatgaacttcatgttctatgttcgaccaatccttttctgaattagtattcatgctttactttgcgaatgcttgtaaataatctagcaccgtttgttattaaagtaacaactgccactgcttttttgaacttacgtggtgacttaattgaaatgtaaaagtctaacacggttcctacagtgcttaaacctaatgaaagatatactaattttttatttttagcatgatatttatagccattgtagccgtcgactatgaaacctgcgacatttagtaaacttgataaacgttgtgatttggaacgttttgccataataataattccccctagtatcttctgtttatatgaaaaattgggtgcgctgaattgctaacgttttgcgctataactactcatatatgataacataattgtacagtataattttaaaaattgatttcacaaagttggggtgtcaaagatgattaaatgtgtctgtttagttgaagaaacagctgataaaatattacttgttcaagtaaggaatcgcgaaaagtattatttcccaggtggtaaaatagaagaaggggaatcacgagtacaagcgctgttaagagaagtaaaagaagaattaaatttaacattaacaatggatgaaattgaatatatcgggacaattgtaggtcctgcatatccacaacaggatatgttaactgagttaaatggatttcgcgcattaaccaaaatcgattgggaaaacgtaactatcaataatgaaattacggatatacgctggattgataaagataatgatgcgttgattgcgcctgctgtcaaagtttggattgaaacgtatggtggtaaacatgacaaataatgacaccatcatgttacgacattatgtcccacaagattattcgatgttagaagcttttcaattaagtgaaagtgatttgaagtttgttaaaacgccagaggaaaatattacagctgcaatgtctgataatgaaaggtatcccatcgttgtaatggatggcaggcaatgtgtggccttttttacattacatcgtggaaaaggggtcgcaccatttagcgataaccaagatgcagtatttttcaggtcatttagtgttgatcaacgttatcgtaatagaggaataggtaaagtggtaatggaaaaattggcgtcatttatcacttcaacatttcaggatattaatgagattgtgttaacggttaatactgacaatccacatgccatggcactttatcgccaacaaggatatcaatatatgggagatagtatgttcatcggaagacctgttcatattatggcgttaactataaaataaattaaatttaaaagcatctttactcatcgtcgaccacaacaattaatgatgaataaaggtgctttttgttatagatcatcggacaatttactatagtaaaaagcgacctagtgaacaattgacatatatccacaggtcgcttaacttaagttatattgctagttgcgattaattgatagactcatcatttttgcgctgtcgagatggtctttttattaaaaatgccgtaatccaagccgtaatcggaatactgattgcaacggcaataccgcctaaaataatagaaataaattcttgggcaaatattttcgagtttataatatgaccaaatgaatatttaagtttgaaaaaccaaataaataaagcaagttggccaccaaaaaaggcaaggtaaatcgtgttcgcagatgtcgctaaaatttctctaccaacacgcatgccagattggaataattcgtattgcgtaagcgttggattcacttgatgcaattcataaatgggtgaactaatggtaattgttaaatctatcacagctgcaataacagcaagaataatagtgaacaccataaattgaaccatatcaatgccaatattcattgaatacacatatgtttcatcttgttgttcggttgaaaagccttgtagatgaccgaagtagaccgataaataaatgagtgtaatcaacaatattgttgtaacgatagtgctgataaatgcagcttgtgttttaacattgtaactattgagtacgaataaattacaagcgccaataataatgcagaaaaagaatgtgacgacataaatcggtacgccaaaaataatcaacacaatactaataattaaaatagcaaaatttaaaaatagggttaaataagagatgaatccctttctacctccgaaaattatcatcagaaagaggagcaataacgccaatataaatacagcattcattgtttcgccctccttaatgtttcaaatatttccataaacaatattgtgataggaattgtaagtacgatacctataccacctgttagtgcgcgcgcaatttctaacgaccaattcatcgaaatagtataagtcactgtattggcattttttaaaaagattaaaaacataggtagtgcaccggataaatatgagaataataagatgttagtcattgttcccataatatcttggccgatgtttcggccagcaagcgcccatctcctcattgaaatgtgtggcgtacgctgtaaaatttcatgcataccactagcaattgtaattgcaacatccataatagcgccaagtgaacctattaacactgaggctaggaagatatctttcggtggtaatgataaaaagttcatcgtttcatatttaatgcctttaccgtctgtcatatatatgattaattctgttaaacctatactcaaaaaagttccgataattgtactggctatggtaatgagtgtgcgcatatgccagcctgtaacgagcaataaagtgagtattgttgaacagatcatggcaatggtcatgagtaagaataaattaatattgctatgttgaatatgaatgtaaattgcgattaatatggcaatagaattcaagattaacgataaaatcgattgcagtccgactttgcgaccaaccaataatacagttaataagaacaaaccagtgatgataaccgttaaggtatcacgcttcttttctataatataagcatcactcggcttgttagaaatatgtaataatactttttcgtgtgtgcgaaatgcctcagaatctgcttgcgatttgacgtactgatgattaatcgtcgtcgtttctccagcaaattgaccatttaatattttgacttttaattgatttttatatttaatatcacgattattttgtgcatcttttgtaggtgtcgaagaaacatgtttgacatctataatttgaccaattggtttgttgtaaaagttctcattattgaatgtaaataaaatagcaccaatgaatgcgatgcagaacaaacctaaaattatattaaatggctttgtaaataaatttctatatttcaaaaacaaaaccccaattctatgaatgaattaatatggtgattatacgcccttaattttttattttcaaagatattactgctaagtgtaaaacgaaaatcatcattgatagcatcgaattacttaatggaatgtagacgttttagtcattaattgctgaatgagtgttaataagataccaatatcactcttcgtataaggttctttcgtaatagcacatatcgttctttttaattcagtatgatctaattttatatctatccatgatttagattctggtaaatgtatattttgtgatgaaatgatgtaaccttctttttgacgaaggagatactgcgcaagtggttggctactgattgtgtatacatctgatttagtaatcttgcgcaattgtttttttacagtttcggcaaatggtgccaagcaataaatatgactatgctcaaactgaattaatggtgggtgtgtcgccatcgtaattggatcgtctgaaggcgcatataaatgatagtgctcttcgaataaaggtagcatatgtaattgtttgtgtttacgtatttctggtgtaagttccgtgaaaccaatgtctatattcccatttaatacgctatttataatcgtgtcatgatctaataagttcggtatgacatgtgtatcattttgtaaatgaaacgtttggataagtggtagtaacatgtgggatacgtcactctcatcatagccaatgtagatacttttatttttagttaatccatggctttgaaattgttcaatcgtgctatctaaatgttcaataatgcgcagagcttcattaaataataatttcccttcagaagtgagcgtaatattgcgtccttgctttttaaataaagacacattaagttcttgttctaataatgtaatttgacggcttatcgctgattgagcaatgtttagttcaagtgctgtttcggagatatgttctcttttagcgacctcgataaaatatcttaattgtttaatttccatagtgatataggcacctccaaaaatgagtgttttgtaactattatagcaatattattgataaatgttctattttttagatgaatatcttctattttatatattgaacagataaattttttagattatagtaattatcattaataactaatatcagaatattctaaaaaaaggggtgtgcatcatgcacaatgagaaattaattaaaggcttatatgactatcgtgaggaacatgatgcgtgtggtattggtttttatgcgaatatggataataaaaggtctcacgacatcattgataaatcgcttgaaatgttgcgacgcttagatcacaggggcggggtcggcgcagatggcatcactggtgatggcgcaggtattatgactgaaataccttttgcatttttcaaacaacatgtaacggactttgatatcccaggtgaaggtgaatatgccgtggggttatttttttccaaagaacgcattttaggttctgaacatgaagcagtttttaaaaaatattttgaaggtgaagggttatcaattcttggttatcgtaatgtaccagttaataaagatgccattgctaaacatgtagcagatacgatgccagtcattcaacaagtgtttattgatattagggacattgaagatgttgaaaagcgtttgtttttagcgagaaaacaattagagttctattcgactcagtgcgatttagaattgtattttacgagcttatcacgcaaaacaattgtatataaaggttggttacgatcagaccaaattaaaaaactctatacagatttatcggatgatttatatcaatcaaagctagggttagtgcattcgagatttagtacgaatacattcccgagttggaaaagggcgcatcctaaccgtatgttaatgcataatggtgagattaacacgattaaaggtaatgtgaactggatgcgagcacgccaacataaattaatcgaaacattatttggcgaggatcaacataaagtgtttcaaattgtcgatgaggatggtagtgactctgccattgtagataatgcgctagagttcttatcgttagccatggagccagaaaaggcagcgatgttactcatacctgaaccttggttatacaatgaagcgaatgatgcaaatgtacgtgcattttatgaattttatagttatttaatggaaccgtgggatggtcctacaatgatttcgttctgtaacggtgacaaacttggcgcgcttacagatagaaatggattacgtccaggtcgttatacgattactaaagataactttattgtcttttcatctgaagtgggtgttgtggacgtacctgaaagtaatgttgcttttaaaggtcaattgaatcctggaaagttattgcttgttgattttaaacagaataaagtcattgaaaataatgatttgaaaggtgcgattgctggagaattaccatataaagcgtggattgataaccataaagttgactttgattttgaaaatatacaatatcaagattcgcaatggaaagatgagacgttatttaaattacaacgtcagtttgcatacacgaaagaagagattcataagtatattcaggaacttgtagaaggtaagaaggatcctatcggtgcaatgggatatgatgcgccaattgcagtgttgaacgagcgaccagaatcactatttaattactttaaacagctgtttgcacaagttacgaatccaccaattgatgcgtatcgtgaaaaaatcgtaacgagtgaactttcttatttaggtggcgaaggtaacttactagcacctgacgaaacggttttagatcgtattcaattgaaaaggccggtattgaatgaatcacacatagcagcgattgatcaggaacattttaaattaacttatttatcaacggtatatgaaggggatttggaagatgcgttagaagcattaggccgagaagcagtgaatgctgtaaagcaaggcgctcaaattctagtgttagatgatagtggattagttgatagcaatggctttgcaatgccgatgttactcgcaataagtcatgtgcatcaattacttattaaagcagatttacgtatgtctacaagtttagtcgctaaatctggtgagacacgagaagtgcatcatgttgcttgtttactcgcatatggcgcgaatgcaattgtgccatacctagcgcaacgtacagttgaacaactgacattgacagaagggttacaaggcaccgttgtcgataatgttaagacatatacggatgtattgtccgaaggtgtcattaaagtaatggctaagatgggaatttcgacagtgcaaagttatcaaggtgcacaaatatttgaagcgattggcttgtctcatgatgtgattgatcgttattttactgggatacagtctaagttatcgggtatttcgattgatcaaattgatgctgaaaataaagcacgtcaacaaagtgatgataattatcttgcatcaggtagtacattccaatggagacaacaaggtcaacatcatgcttttaatccggaatctattttcttattgcagcacgcatgtaaagaaaatgactatgcgcaatttaaagcatactctgaagcggtgaacaaaaatagaacagatcacattagacatttacttgaatttaaagcatgtacaccgattgacatcgaccaagttgaaccggtaagtgacattgtcaaacgctttaatacaggggcgatgagttatggatcgatttcagcggaagcacatgaaacgttagcacaagccatgaaccaattaggtggaaagagtaatagtggtgaaggtggcgaagatgcaaaacgttatgaagtacaagttgatggaagcaacaaagtaagtgcgattaaacaagttgcttctgggcgttttggtgtaactagtgattatttacaacatgccaaagaaattcaaattaaagttgcgcaaggtgcaaagcctggtgaaggtggtcaattacctggtactaaggtatatccgtggattgcgaagacaagagggtcaacgccaggtatcggtctgatttcaccaccgccacatcatgatatttattcaatagaagatttagcgcaactgatacatgatttaaaaaatgcgaataaagatgcagatatcgcggtaaaattagtttcgaaaacaggtgttggtaccattgcatctggggtggcaaaagcatttgcagataaaattgtcatcagtggttacgatggtggtacaggggcttcacctaaaacgagtattcagcatgccggtgttccttgggagattggtttagcagaaacacatcaaacattaaaactaaacgacttaagaagtcgtgttaagttagaaacagacggtaagttattaactggtaaagatgtagcgtacgcatgtgcgcttggagcggaagaatttggatttgcaactgcaccattagtggtgttgggctgtattatgatgcgtgtatgccataaagatacatgtccagtaggagttgcaactcaaaacaaagatttacgtgctttatatagaggtaaagcacatcatgttgttaattttatgcattttattgcacaagaattaagagaaattttagcatctttaggtttgaaacgtgtagaagacttagttggaagaactgatttattacaacgatcatcaacattaaaagtgaatagcaaagcggctagtattgatgttgaaaaactgttatgtcctttcgatgggccaaacacaaaagaaattcaacaaaatcataatcttgagcatggatttgatttaacaaatttatatgaagtaacgaagccgtatattgctgaagggcgtcgctatacaggtagctttacagtaaataatgaacaacgtgatgtaggagttattacaggtagtgagatttcgaaacaatatggagaagcaggacttcctgaaaatacaattaatgtttatacgaatggtcatgctggtcaaagtcttgcagcatatgcaccgaaaggcttaatgattcatcatactggagatgcgaatgactatgttggtaaaggattatctggtggtacggtcattgtcaaagcaccttttgaagaacgacaaaatgaaattattgctggtaacgtctcattctatggtgcgacaggtggtaaggcatttattaacggtagtgcaggagaaagattctgtattagaaatagtggtgtagatgttgtcgttgaaggtatcggtgaccatggattagagtacatgactggtggacatgtcattaatttaggtgatgtaggtaagaacttcggtcaaggtatgagtggtggtattgcttacgttatcccgtctgatgtagaagcttttgttgaaaataatcaactagatacgctttcgtttacaaagattaaacaccaagaagaaaaagcattcattaagcaaatgctggaagaacatgtgtcacacacgaatagtacgagagcgattcatgtgttaaaacattttgatcgcattgaagatgtcgtcgttaaagttattcctaaagattatcaattaatgatgcaaaaaattcatttgcacaaatcattacatgacaatgaagatgaagcgatgttagctgcattttacgatgacagtaaaacaatcgacgctaaacataaaccagccgttgtgtattaaggaaagggggagatacgatgggtgaatttaaaggatttatgaagtatgacaaacagtacttaggtgaattatcactggtagaccgtttgaagcatcataaagcatatcaacaacgatttactaaagaagatgcctctatccaaggtgcacgatgtatggattgtggaacgccgttttgtcaaaccggacaacagtatggtagggaaacaataggttgtccaattggaaactacattcctgaatggaacgacttagtgtatcatcaagattttaaaactgcttatgaacgcttaagcgaaacaaataactttcctgactttacagggcgtgtatgtcctgcaccatgcgaaagtgcttgtgtgatgaagattaatagagaatcgattgcgattaaaggtattgaacgcacaattattgatgaagcttttgaaaatggttgggtagcgccgaaagttccgagtcgccgtagagatgaaaaagtggcaatcgttggaagcggtccagcaggattagctgctgctgaagaacttaatctactaggatatcaagtaactatttatgaacgtgctagagaatcaggcggtttattaatgtatggtattccgaatatgaaacttgataaagatgtggttcgacgtcgtattaagttaatggaagaagcgggcattactttcattaatggtgttgaagtaggcgttgatattgataaagcaacgttagaatctgagtatgatgccattatattatgtactggtgcacaaaaaggtagagatttacctttagaaggacgcatgggtgatggtatacatttcgctatggattatttaactgaacaaacgcagttgttaaatggagaaattgatgatataacaataactgcaaaagataagaatgtcattatcattggtgctggtgatacaggggcagactgtgtagcgacagcattaagagaaaattgtaaatcgattgttcaatttaataaatatacgaaattgccagaagcaattacatttacagaaaatgcatcatggcctttagcaatgccggtgtttaaaatggactatgcgcaccaagagtacgaagctaagtttggtaaggaaccacgtgcatatggtgttcaaacaatgcgttacgatgttgacgataaaggacacatacgtggtttgtatactcaaattttagagcaaggcgaaaatggtatggtcatgaaagaaggacctgaaagattttggcctgctgaccttgtattattatcaatcggcttcgaaggtacagaaccaacagtaccgaatgcttttaacattaaaacggatagaaatcgaatcgtggcggatgatacaaactatcaaactaataatgaaaaggtatttgctgctggagatgctagacgtggtcaaagtttagttgtatgggcgattaaagaaggtagaggcgtagcgaaagcagtagatcagtatttagcgagtaaagtttgtgtataatctttgtatggaaatggtggttacgttgacgttgtggcatgctgaatcgagtttgaaataatctagtatctatcaacgtcacatgccatctttgtaacctaaaaacaaaggtttgtaagacaacaaatcgattaattataagtagtgattttttacattcgtttataggtcaactgtagtggaagacaatgatttgtggtaatcatgtaatgcttaaaaacaatattgacttttacagaacgttcatatatgataaatattgtgtttaggaggaatacccaagtccggctgaagggatcggtcttgaaaaccgacaggggcttaacggctcgcgggggttcgaatccctcttcctccgccatcaatatttatattaaatactatatataatgaaggtaagtgctcaaattttgagtatttgccttttttatttgtctttgaatggctcgtttttttagctatagaaatgatagggcattgagattggaagggcatttggcttgtgcaatatacatagctaaatgtcttttttgttttgtgaaatatgatggatggcttgtgtgggcaagtttgctatttatagatatgcatttttcaatttaggagttggccatgcatctacactttataatggtgagagcgtggtgaggtattgttaatcacgcaattgtagcgaggagttattgctacatatgtcgttatggctcattgattttctgaaatggctaccccagataattgtgacaaaataaaaaatatttgttgaaagcctttacataacttgtctagacaagttatactcgttttaagacattaagggagtgaaatatatggctgtaaaaagagaagatgtaaaagccatcgtaagcgctattgggggaaaagaaaatcttgaagctgcaacgcattgtgtaacacgattacgtttagtgcttaaagatgaaagcaaagttgataaagacgcattaagtaataacgcgttggtcaaggggcagttcaaagcagaccatcaatatcaaattgtcattggtccaggaacagtcgatgaagtgtataagcagtttattgatgaaacaggtgctcaagaagcttcgaaagatgaagcgaaacaagcagctgcgcaaaaagggaatccagtacaacgtttgatcaaattgttaggggatatttttataccaatattacctgcgattgtgacagctggtttgttaatggggatcaataatttacttacaatgaaaggtttatttggtccaaaagcacttattgagatgtatccacaaattgctgatatttcaaacatcattaatgtgattgcgagtacggcatttattttcttaccagcattaattggttggagtagtatgcgtgtatttggtggtagtccgattctaggcatagtcttaggtttgattttaatgcatccgcaattagtatctcagtatgatttggcaaaagggaatattccgacgtggaacttatttggcttagagattaagcagttgaattaccaaggtcaagtgttgccagttttaattgcagcttatgttctagctaaaattgaaaaaggattaaataaagtcgttcacgattcgataaaaatgttggtcgttggacccgtagcgcttttagttactggatttttagcatttattatcattggaccagttgcgttattgattggtacaggtattacatctggtgttacatttatattccaacatgcaggatggcttggcggagcaatatatggattgttatatgcaccacttgtaattacaggactacaccatatgtttttagcagtagatttccaattgatgggtagcagcttaggtggtacgtacttatggccaatcgttgcgatttccaatatttgtcagggctctgcagcatttggagcatggtttgtctataaacgtcgtaaaatggttaaagaagaaggcttggcattaacatcttgtatttctggtatgttaggtgttactgaaccagccatgtttggtgtgaacttacctctgaaatatccatttatcgctgcgatatcaacatcttgtgtattgggggcaatcgttggtatgaataacgtacttggaaaagttggtgttggtggcgtgccagcattcatttcaattcaaaaagaattttggccagtatatctcattgtgacagctattgctattgttgtaccatgtatactaacaattgtgatgtctcattttagtaaacaaaaagcgaaagaaattgttgaagattaataaaataaaaaaggggcgttcgttatttggacgtcctttattacgttataaggtggtaattgtgtgtcgaaagaaatagattggagaaaatccgttgtatatcaaatttatcctaagtcgtttaatgatacgacggggaatggtataggagatatcaatggaattatagaaaaattggattatatcaagttattgggtgttgattatatttggttaacaccagtgtatgaatcaccgatgaatgataatggctatgatatcagcaattatttagaaatcaatgaagactttggaacgatggatgattttgaaaagttaatcaaagttgctcatcaaaaagacttgaaagtgatgttagatattgtcattaatcatacgtcgacggagcatgaatggtttaaagaagcccgtaaatctaaagacaacccttatagagattattactttttcagatcatctgaagacgggccgccaacaaattggcattctaaattcggtggtaatgcatggaagtttgattctgagacagatgaatattatttacatttatttgatgtcagtcaagctgatttaaattgggataatccggaagtacgtcaatcgttatatcgcatagtcaatcattggatagacttcggcgttgatggttttcgatttgatgtcattaacttaatttctaaaggtgaatttaaggactctgacaaaataggtaaagaattttatacggatggtcctagagtgcatgagtttctgcatgaattaaatcgtcaaacgtttggtaacactgacatgatgactgtaggagaaatgtcttcgacgacgattgaaaattgtattaagtatacacagccagaacgccaagaattgaatagtgtttttaattttcatcatctaaaggttgattatgttgatggtgaaaagtggacaaatgcgaagcttgatttccataagttaaagaaaattctgatgcaatggcaacgaggtatttatgacggtggcggatggaacgcgattttctggtgtaatcatgatcagccacgggtagtgtctagatttggtgatgatacgtcggaagagatgaggatacaaagtgctaaaatgttagctatcgcactgcatatgttgcaagggacgccatatatttaccaaggtgaagaaattggtatgacggacccacattttacatcaatagcacaatatcgcgatgttgaatcgattaatgcctaccatcagttgttaagtgaagggcatgctgaagcggatgtgttaacgattttaggacagaagtcacgagacaattcgagaacgcctatgcaatggagtgatgatgttaatgctggatttacagctggtaagccttggattgatatttcggaaaattatcatcaggtcaacgttagacaagcacttcagaataaagagtctattttctatacgtatcaaaaattaatacaattaagacatacgcatgatattattacgtatggagacattgtgccacgttttatggatcatgatcatttatttgtttatgaacgtcattataagaatcaacaatggctagtaattgcgaatttctcagcatcggctgttgatttgccagaaggattggctagagaaggtcgtgttgtgattcaaacaggcacagtggaaaataatacgataagcgggtttggtgcaattgtaatcgaaacaaacgcgtaaaataaattgagtggatgcgtttatatggcgaaacaaaaaaagtttatgaagatttatgaggcgttgaaagaagatatattaaacgggcagattcaatatggtgaacaaattccgtctgaacatgatttggtgcaattgtaccagtcatctcgagagaccgtgcgtaaggcattagatttgttggcattagacggcatgattcaaaagattcatggtaaagggtcacttgtcatttatcaggaggttacagagtttccattttctgaactggttagttttaaagaaatgcaagaagaaatgggcgtcgcatatttaactgaagttgttgtgaatgaggttgttgaagcgcatgaagttccagaagttcaacatgctttaaacatcaattctagtgaatcactcattcatattgttagaactcgtcggcttaaccaacatgtgaagattgttgatgaagattattttctaaagtcgattgtttcagacataggtaatgatgttgcgagtgattctatttatgattatttggaaaaggtattaaatcttaatattagttattcaagtaagtctattacttttgaaccgtttgatgaacaagcatatcaattgtttggtgatgtatcggtggcttattcagcaacagttcgaagtattgtgtatttagaaaatacaatgccgtttcaatataatatttcaaaacatcttgcaaatgaatttaaatttaacgacttctcaagacgtcgtataaagtaaacaatgatataaatgatttatacttgcaattaactattaaaatatagtaatatatatcttgccgtgctaggtggggaggtagcggttccctgtactcgaaatccgctttatgcgaggcttaattcctttgttgaggccgtatttttgcgaagtctgcccaaagcacgtagtgtttgaagatttcggtcctatgcaatatgaacccatgaaccatgtcaggtcctgacggaagcagcattaagtggatcatcatatgtgccgtagggtagccgagatttagctaacgactttggttacgttcgtgaattacgttcgatgcttaggtgcacggttttttattttttaaatattaaaccgattattaagagttgaaaatatatatttatttatagaagctactttcttgaagacaattcagcgtattatacgtggaacatgtttgtgggaagtagcttttttatatgtgaagtttgattcaagtgaaatcgatgtgcagtttgaatgatttttgtgtcaatgaaaagtaagaagttattatttgatgataaagaaatgatggtgaaatgagggggagtatcttacaatagaattattaatgagatacgttatgattattgacaatcaaatgcctacggaggacatatgcaaatatatttaagtactttaacagagttagattatgataaatctttaaatagtattgaagaaagttttgatgataatcctgaaacgagttggcaagcacttgcgaaagtaaaacatttaagaaaatctccttgctataattttgaattagaagtaatagcgaaaaatgaaaataacgatgtcgttggacacgttttattaattgaagtagaaattaatagtgatgataagacgtattatggtttggcgattgcctctttatcagttcatcctgaattacgtggacaaaaattaggtcgtggcttggttcaagcagtagaagagcgtgccaaagcacaagagtatagtacggttgttgtagaccattgttttgactactttgaaaagttgggttatcaaaatgctgctgagcatgacattaaattagaatctggtgatgcaccgttacttgtaaaatatttatgggataatttgacggatgcaccacacggaatcgtaaaatttccagaacatttttattaattgttcaattaagaagtaaaggtattatcatgctataatgagaggtaattgtttatggaggtgctaacttgaattatcaagccttatatcgtatgtacagaccccaaagtttcgaggatgtcgtcggacaagaacatgtcacgaagacattgcgcaatgcgatttctaaagaaaaacagtcgcatgcttatatttttagtggtccgagaggcacggggaaaacgagtattgccaaagtgtttgctaaagcaatcaactgtttaaatagcactgatggagaaccttgtaatgaatgtcatatttgtaaaggcattacgcaggggactaattcagatgtgatagaaattgatgctgctagtaataatggcgttgatgaaataagaaatattagagacaaagttaaatatgcaccaagtgaattgaaatataaagtttatattatagatgaggtgcacatgctaacaacaggtgcttttaatgcccttttaaagacgttagaagaacctccagcacacgctatttttatattggcaacgacagaaccacataaaatccctccaacaatcatttctagggcacaacgttttgattttaaagcaattagcctaaatcaaattgttgaacgtttaaaatttgtagcagatgcacaacaaattgaatgtgaagatgaagccttggcatttatcgctaaagcgtctgaagggggtatgcgtgatgcattaagtattatggatcaggctattgcatttggtgatggtacgttaacattgcaagatgcgttgaatgtcacaggtagcgtacatgatgaagcgttggatcacttgtttgatgatattgtacaaggtgacgtacaagcatcttttaaaaaataccatcagtttataacagagggtaaagaagtgaatcgcctaataaatgatatgatttattttgtcagagatacgattatgaataaaacatctgagaaagatactgagtatcgagcactgatgaacttagaattagatatgttatatcaaatgattgatcttattaatgatacattagtgtcgattcgttttagtgtgaatcaaaacgttcattttgaagtgttgttagtaaaattagctgagcagattaagggtcaaccacaagtgattgcgaatgtagctgaaccagcacaaattgcttcatcgccaaacacagatgtattgttgcaacgtatggaacagttagagcaagaactaaaaacactaaaagcacaaggagtgagtgtcgctcctgttcaaaaatcttcgaaaaagcctgcgagaggcatacaaaaatctaaaaatgcattttcaatgcaacaaattgcaaaagtgctagataaagcgaataaggcagatatcaaattgttgaaagatcattggcaagaagtgattgatcatgccaaaaacaatgataaaaaatcactcgttagtttattgcaaaattcggaacctgtggcggcaagtgaagatcacgtacttgtgaaatttgaggaagagatccattgtgaaatcgtcaataaagacgacgagaaacgtagtagtatagaaagtgttgtatgtaatatcgttaataaaaacgttaaagttgttggtgtaccatcagatcaatggcaaagagttcgaacggagtatttacaaaatcgtaaaaacgaaggcgatgatatgccaaagcaacaagcacaacaaacagatattgctcaaaaagcaaaagatcttttcggtgaagaaactgtacatgtgatagatgaagagtgatacatgacaagcgatataatcgtatgtataatgaaagaaacatcattttattgataaatatttattgattttcaaggaggaaatggaatatgcgcggtggcggaaacatgcaacaaatgatgaaacaaatgcaaaaaatgcaaaagaaaatggctcaagaacaagaaaaacttaaagaagagcgtattgtaggaacagctggcggtggcatggttgcagttactgtaactggtcataaagaagttgtcgacgttgaaatcaaagaagaagctgtagacccagatgatattgaaatgctacaagacttagtgttagcagctactaatgaagcgatgaataaagctgatgagcttactcaagaacgtttaggtaaacatactcaaggcttaaacatccctggaatgtgatcatagatgcattatccagaacctatatcaaaacttattgatagctttatgaaattgccaggcattggtccaaagacagcccaacgtctggcttttcataccttagatatgaaagaagacgatgttgttcagtttgccaaagcattagtagatgttaagagagaattaacatattgtagcgtatgtggtcacattactgaaaatgatccatgttatatttgtgaagataagcaaagagatcgttcagttatttgtgttgtggaagatgacaaagatgtcatagctatggaaaaaatgagagaatacaaaggtttatatcacgttttacatgggtctatttcgcctatggatggcattggaccagaagatattaatattccttcattgattgaacgcttgaaaaacgatgaagttagcgaattaatcttagctatgaacccgaacttagagggggaatctacagccatgtatatttctagattagttaagcctataggtatcaaagtgacgagattagcacaagggttatcggtaggtggcgatttagagtatgctgacgaagtaacattatctaaagcaatcgcaggtagaacagaaatgtaatgtcttctattaaacatttttgattttaatactatagtaagaaaagtcacagtgtaatcattgtggctttttttatggtgtggtgtgatgtactactttatttgcggtgtggcggtggtatggtttacctagttttactgagggatgggtaatctttaggaagcaagccgttggttgtgatttgttacttctaatagtaatgatgtgaattggattatcgaattagatctatggttatggtgtgttggtgctattaatttgataaatgcggttaatgactatgcaaatgaaattcttttgtaattgaaatgatagatgctggcttagtaagttgtacttctttggtctaaagcttattaaatcagcctgtatagcggtgttttgagagattatttaaaacttgtaaatttatttttaatttctggtaaaaaaataacgttctgttttgcggtttttttgattgatatggttagaaaaaaatctgtttcttgttctaaaaaacgtactatttataagtggggatttttttaagttcgatttttaggataagggcgttcagtacagatgacaaaggtgtaatttttactgttgttaagcagtttgaaagcctgtatagtatttatttgttgaggcaaacaaaacaattcaacttaagaaataacttgaattactaacgaaaattaattttaaaaagttgttgacttaaatgttaataaaatgtataattaattcttgtcggtaagaaaaatgaacattgaaaactgaatgacaatatgtcaacgttaattccaaaaaacgtaactataagttacaaacattatttagtatttatgagctaatcaaacatcataatttttatggagagtttgatcctggctcaggatgaacgctggcggcgtgcctaatacatgcaagtcgagcgaacggacgagaagcttgcttctctgatgttagcggcggacgggtgagtaacacgtggataacctacctataagactgggataacttcgggaaaccggagctaataccggataatattttgaaccgcatggttcaaaagtgaaagacggtcttgctgtcacttatagatggatccgcgctgcattagctagttggtaaggtaacggcttaccaaggcaacgatgcatagccgacctgagagggtgatcggccacactggaactgagacacggtccagactcctacgggaggcagcagtagggaatcttccgcaatgggcgaaagcctgacggagcaacgccgcgtgagtgatgaaggtcttcggatcgtaaaactctgttattagggaagaacatatgtgtaagtaactgtgcacatcttgacggtacctaatcagaaagccacggctaactacgtgccagcagccgcggtaatacgtaggtggcaagcgttatccggaattattgggcgtaaagcgcgcgtaggcggttttttaagtctgatgtgaaagcccacggctcaaccgtggagggtcattggaaactggaaaacttgagtgcagaagaggaaagtggaattccatgtgtagcggtgaaatgcgcagagatatggaggaacaccagtggcgaaggcgactttctggtctgtaactgacgctgatgtgcgaaagcgtggggatcaaacaggattagataccctggtagtccacgccgtaaacgatgagtgctaagtgttagggggtttccgccccttagtgctgcagctaacgcattaagcactccgcctggggagtacgaccgcaaggttgaaactcaaaggaattgacggggacccgcacaagcggtggagcatgtggtttaattcgaagcaacgcgaagaaccttaccaaatcttgacatcctttgacaactctagagatagagccttccccttcgggggacaaagtgacaggtggtgcatggttgtcgtcagctcgtgtcgtgagatgttgggttaagtcccgcaacgagcgcaacccttaagcttagttgccatcattaagttgggcactctaagttgactgccggtgacaaaccggaggaaggtggggatgacgtcaaatcatcatgccccttatgatttgggctacacacgtgctacaatggacaatacaaagggcagcgaaaccgcgaggtcaagcaaatcccataaagttgttctcagttcggattgtagtctgcaactcgactacatgaagctggaatcgctagtaatcgtagatcagcatgctacggtgaatacgttcccgggtcttgtacacaccgcccgtcacaccacgagagtttgtaacacccgaagccggtggagtaaccttttaggagctagccgtcgaaggtgggacaaatgattggggtgaagtcgtaacaaggtagccgtatcggaaggtgcggctggatcacctcctttctaaggatatattcggaacatcttcttcagaagatgcggaataacgtgacatattgtattcagttttgaatgtttatttaacattcaaatattttttggttaaagtgatattgcttatgcgagcgcttgactaaaaagaaattgtacattgaaaactagataagtaagtaaaatatagattttaccaagcaaaaccgagtgaataaagagttttaaataagcttgaattcataagaaataatcgctagtgttcgaaagaacactcacaagattaataacgcgtttcctgtaggatggaaacatagattaagttattaagggcgcacggtggatgccttggcactagaagccgatgaaggacgttactaacgacgatatgctttggggagctgtaagtaagctttgatccagagatttccgaatggggaaacccagcatgagttatgtcatgttatcgatatgtgaatacatagcatatcagaaggcacacccggagaactgaaacatcttagtacccggaggaagagaaagaaaattcgattcccttagtagcggcgagcgaaacgggaagagcccaaaccaacaagcttgcttgttggggttgtaggacactctatacggagttacaaaggacgacattagacgaatcatctggaaagatgaatcaaagaaggtaataatcctgtagtcgaaaatgttgtctctcttgagtggatcctgagtacgacggagcacgtgaaattccgtcggaatctgggaggaccatctcctaaggctaaatactctctagtgaccgatagtgaaccagtaccgtgagggaaaggtgaaaagcaccccggaaggggagtgaaatagaacctgaaaccgtgtgcttacaagtagtcagagcccgttaatgggtgatggcgtgccttttgtagaatgaaccggcgagttacgatttgatgcaaggttaagcagtaaatgtggagccgtagcgaaagcgagtctgaatagggcgtttagtatttggtcgtagacccgaaaccaggtgatctacccttggtcaggttgaagttcaggtaacactgaatggaggaccgaaccgacttacgttgaaaagtgagcggatgaactgagggtagcggagaaattccaatcgaacctggagatagctggttctctccgaaatagctttagggctagcctcaagtgatgattattggaggtagagcactgtttggacgaggggcccctctcgggttaccgaattcagacaaactccgaatgccaattaatttaacttgggagtcagaacatgggtgataaggtccgtgttcgaaagggaaacagcccagaccaccagctaaggtcccaaaatatatgttaagtggaaaaggatgtggcgttgcccagacaactaggatgttggcttagaagcagccatcatttaaagagtgcgtaatagctcactagtcgagtgacactgcgccgaaaatgtaccggggctaaacatattaccgaagctgtggattgtcctttggacaatggtaggagagcgttctaagggcgttgaagcatgatcgtaaggacatgtggagcgcttagaagtgagaatgccggtgtgagtagcgaaagacgggtgagaatcccgtccaccgattgactaaggtttccagaggaaggctcgtccgctctgggttagtcgggtcctaagctgaggccgacaggcgtaggcgatggataacaggttgatattcctgtaccacctataatcgttttaatcgatggggggacgcagtaggataggcgaagcgtgcgattggattgcacgtctaagcagtaaggctgagtattaggcaaatccggtactcgttaaggctgagctgtgatggggagaagacattgagtcttcgagtcgttgatttcacactgccgagaaaagcctctagatagaaaataggtgcccgtaccgcaaaccgacacaggtagtcaagatgagaattctaaggtgagcgagcgaactctcgttaaggaactcggcaaaatgaccccgtaacttcgggagaaggggtgctctttagggttaacgcccagaagagccgcagtgaataggcccaagcgactgtttatcaaaaacacaggtctctgctaaaccgtaaggtgatgtataggggctgacgcctgcccggtgctggaaggttaagaggagtggttagcttctgcgaagctacgaatcgaagccccagtaaacggcggccgtaactataacggtcctaaggtagcgaaattccttgtcgggtaagttccgacccgcacgaaaggcgtaacgatttgggcactgtctcaacgagagactcggtgaaatcatagtacctgtgaagatgcaggttacccgcgacaggacggaaagaccccgtggagctttactgtagcctgatattgaaattcggcacagcttgtacaggataggtaggagcctttgaaacgtgagcgctagcttacgtggaggcgctggtgggatactaccctagctgtgttggctttctaacccgcaccacttatcgtggtgggagacagtgtcaggcgggcagtttgactggggcggtcgcctcctaaaaggtaacggaggcgctcaaaggttccctcagaatggttggaaatcattcatagagtgtaaaggcataagggagcttgactgcgagacctacaagtcgagcagggtcgaaagacggacttagtgatccggtggttccgcatggaagggccatcgctcaacggataaaagctaccccggggataacaggcttatctcccccaagagttcacatcgacggggaggtttggcacctcgatgtcggctcatcgcatcctggggctgtagtcggtcccaagggttgggctgttcgcccattaaagcggtacgcgagctgggttcagaacgtcgtgagacagttcggtccctatccgtcgtgggcgtaggaaatttgagaggagctgtccttagtacgagaggaccgggatggacatacctctggtgtaccagttgtcgtgccaacggcatagctgggtagctatgtgtggacgggataagtgctgaaagcatctaagcatgaagcccccctcaagatgagatttcccaacttcggttataagatccctcaaagatgatgaggttaataggttcgaggtggaagcatggtgacatgtggagctgacgaatactaatcgatcgaagacttaatcaaaataaatgttttgcgaagcaaaatcacttttacttactatctagttttgaatgtataatttacattcatatgtctggtgactatagcaaggaggtcacacctgttcccatgccgaacacagaagttaagctccttagcgtcgatggtagtcgaacttacgttccgctagagtagaacgttgccaggcaaaaaatggatgcgatgagccgcattgagaccgcaaggtctcttttttttatgtctaaaacatcaaaataaaaagcaaacacaaagaaaaatggcttggcgaagtgaaaacgtttgaatctgacgaaacgagaaaagagcgcaacgagtttagtagagctaaatgagtaagcgagagccgaaggagaggaaagaagcaagcgattgtcacaagtcaagaaaggttcttagcgacgatggtatccaacttacgttccgctagagtagaacgttgccaggcaaaaatggatgcgatgagccgcattgagaccgtgaggtctctttttttatgtctaaaacatcaaaataaaaagcaaacacaaagaaaaatggcttggcgaagtgaaaacgtttgaatctgacgaaacgagaaaagagcgcaacgagtttagtagagctaaatgagtaagtgagagccgaaaaagaggaaagaagcaagcaattgtcacaagtcaagaaaggtctttagcgacgatggtagccaacttacgttccgctagagtagaacgttgctaggcaagaaatggatgcgatgagccgcattgagttttggaaatgatattttaataatgtgcacttttgattgtttaaatctgtgactagaagtataagtgaagacattcagaagtattataaaaagtgaacagcagtaagatagtttttaatcataaatcatcttactgctgtttttaggttttatgtctaatattttttaaatcgaaatacaaaaaggaaattaattattatacaatagacaagctattgcataagtaacactaacttttgtcaaagaagtgttactatataattaatacttttgaaagtaactaattccaaaacagtgtaaataaaggaagcgtatatcatgaagcaacctattttaaataaattagaaagtttaaatcaagaagaagcgatttctttgcatgttccgggtcataaaaatatgactatcggtcatttatctcaattatcaatgacaatggataaaactgaaatacctggattagatgatttacatcatcctgaagaagtcattttggaaagtatgaagcaggtggagaaacattcagattatgatgcttatttcttagtgaatggcaccacttcaggaatattatctgtcatccagtctttttcacagaaaaaaggcgatatcttaatggcaagaaatgtacataaatctgtattacatgcgctcgatattagccaacaagaagggcattttattgaaacgcatcaaagtccgttaacgaatcattataataaagttaatttaagccgtttgaataatgacggtcacaaacttgctgtgttgacttatcctaactattacggtgaaacatttaatgtagaagaggttatcaaatctttgcaccaattaaatattcctgtactcattgacgaagcacacggcgcgcactttggattgcaaggatttccagattctacattaaattatcaagctgactatgttgttcaatcttttcataaaacgttaccagctttaacgatgggctcggtactttatattcataaaaatgcaccttatagagaaactattatagaatatctaagctacttccaaacatctagtccttcgtatttgattatggctagtttagagtcagctgccgagttctataaaacatatgatagtaccgtgttttttgataagagagcgcaattaatcgaatgtttggagaagaagggttttgaaatgcttcaagttgatgatccgttgaagttgctgataaaatatgaaggttttacaggtcatgatattcaaaattggtttatgaatgcacatatctatttagaattagcggacgactatcaagtattagcggtattgccgttatggcatcatgatgatacgtatttatttgattcgcttttacgtaaaattgaagatatgattttaccgaaaaaatcagtttctaaagttaaacaaacacaacttttaacaactgaaggtaactataaaccaaaacgctttgaatatgttacttggtgtgatttgaaaaaggcaaaaggtaaagttctggcgcgacatattgtcccgtatccgccagggattcctattattttcaaaggagaaacaataactgaaaatatgatagaattagtaaatgaatatctggaaactggaatgatagttgaaggaattaaaaataataaaattttagttgaggatgaataaaatgtcagcttttataacttttgagggcccagaaggctctggaaaaacaactgtaattaataaagtttaccatagattagtaaaagattatgatgtcattatgacaagagaaccgggcggcgttcctactggtgaagaaatacgtaaaattgtattagaaggcaatgatatggacattagaactgaagcaatgttatttgctgcatctagaagagaacatcttgtattaaaggtcataccagctttaaaagaaggtaaggttgtgttgtgtgatcgctatatcgatagttcattagcttatcaaggttatgctagagggattggcgttgaagaagtaagagcattaaacgaatttgcaataaatggattatatccagacttgacgatttatttgaatgttagtgctgaagtaggccgcgaacgtattattaaaaattcaagagatcaaaatagattagatcaagaagatttaaagtttcacgaaaaagtaattgaaggttaccaagaaatcattcataatgaatcacaacggttcaaaagcgttaatgcagatcaacctcttgaaaatgttgttgaagacacgtatcaaactatcatcaaatatttagaaaagatatgatataattgttagaagaggtgttataaaatgaaaatgattatagcgatcgtacaagatcaagatagtcaggaacttgcagatcaacttgttaaaaataactttagagcaacaaaattggcaacaacaggtgggtttttaagagcaggtaatacaacattcttatgtggtgtcaatgatgaccgtgtagatgaaatattgtctgtgattaatcaaacgtgtggtaatagagaacagttggtttcacctattacacctatgggaggcagtgcggattcgtacattccatatccagttgaagttgaagttggcggtgctactgtatttgttatgccagttgatgcattccatcaattttaattctataatacaatcatcaattagagatacttaaaatagtgtattaataagttattaacaattttgggttgcttgactgcgactagttcagatgccaatagatttgatttttgtggttctaaaaataatcacaaatcatggtcgctattgttgcagtaattagttgctctttggcaacctttttatataaaagcaaaagggagtttgtaatgaatggatgaacagcaacaattgacgaatgcatatcattcaaataaattatcgcatgcctatttatttgaaggtgatgatgcacaaacgatgaaacaagttgcgattaattttgcaaagcttattttatgtcaaacagatagtcaatgtgaaacaaaggttagtacatataatcatccagactttatgtatatatcaacaactgagaatgcaattaagaaagaacaagttgaacaacttgtgcgtcatatgaatcaacttcctatagaaagcacaaataaagtgtacatcattgaagactttgaaaagttaactgttcaaggggaaaacagtatcttgaaatttcttgaagaaccaccggacaatacgattgctattttattgtctacaaaacctgagcaaattttagacacaatccattcaaggtgtcagcatgtatatttcaagcctattgataaagaaaagtttataaatagattagttgaacaagacatgtctaagccagtagctgaaatgattagtacttatactacgcaaatagataatgcaatggctttaaatgaagaatttgatttattagcattaaggaaatcagttatacgttggtgtgaattgttgcttactaataagccaatggcacttataggtattattgatttattgaaacaggctaaaaataaaaaactgcaatctttaactattgcagctgtgaatggtttcttcgaagatatcatacatacaaaggtaaatgtagaggataaacaaatatatagtgatttaaaaaatgatattgatcaatatgcgcaaaagttgtcgtttaatcaattaattttgatgtttgatcaactgacggaagcacataagaaattgaatcaaaatgtaaatccaacgcttgtatttgaacaaatcgtaattaagggtgtgagttagatgccaaatgtaataggtgttcagtttcaaaaagcgggaaaattagaatattatacacctaatgatatacaagtagatatagatgactgggtagttgtcgaatctaaaagaggcatagagataggtattgttaaaaatccattaatggatattgctgaagaggatgttgtgttacctcttaaaaatattattcgcgttgctgatgacaaagatattgataaatttaattgtaatgaacgagatgctgaaaatgcattaatactatgtaaagacattgtaagagaacaaggtttggacatgcgtttagtcaattgcgaatatacattagataaatcgaaagttatttttaattttacggcggatgatcgtattgattttagaaaattagtaaaaatattagcgcaacatttaaaaacacgtatcgagttgagacaaattggtgtaagggatgaagccaaattgcttggcggtatcggaccttgtggtaggtcgttatgttgttctacatttttaggagattttgaaccagtatcgattaagatggctaaggatcaaaatttatcattaaatccaactaaaatttctggtgcatgtggtcgtttgatgtgttgtttaaaatatgaaaatgactattatgaggaagtacgtgcacaattacctgatattggtgaagcaattgaaacgcctgatggtaacgggaaagtagttgctttaaatatattagacatttctatgcaggtgaagcttgagggacatgaacagccacttgaatataaattagaagaaatagaaactatgcattaaggaggcattattacatttggatcgcaatgaaatatttgaaaaaataatgcgtttagaaatgaatgtcaatcaactttcaaaggaaacatcagaattaaaggcacttgcagttgaattagtagaagaaaatgtagcgcttcaacttgaaaatgataatttgaaaaaggtgttgggcaatgatgaaccaactactattgatactgcgaattcaaaaccagcaaaagctgtgaaaaagccattaccaagtaaagataatttggctatattgtatggagaaggatttcatatttgtaaaggcgaattatttggaaaacatcgacatggtgaagattgtctgttctgtttagaagttttaagtgattaatcaagcacactcaaatagtgttataattataaatgaatatggtttggataagtctgagacaatgcatgtttcaggctttaattgtgtataaagttttggtgattgcataagagatggcggtactaaatgttattattaagtgtgcacgcagtatcattagttataaaatgtagctgttaaaagtcaaaaatacatcgaatgtagttagtcatataatataaaaagagatttcaattactcaatagaaaaaggttgtcttcataggagttaaaaatgttaaaagagaatgaacgatttgatcaactaatcaaagaagattttagtattattcaaaatgatgatgttttttcgttttcaacggatgctttgttgttagggcattttacaaaacctagaacaaaagatattgtgttggacttatgttcaggcaatggggtgataccgttgttattgtttgcgaaacatccacgacatatagaaggtgttgagattcaaaaaacacttgtcgatatggcgcgacgcacatttcaattcaatgatgttgatgaatatataacaatgcatcacatggatttgaaaaacgttactaaagtatttaaaccttcacaatatactttagtaacgtgtaatccaccttattttaaagagaatcagcaacaccaacatcaaaaagaagcacataagatagcgagacatgagattatgtgtacacttgaagattgcatgattgcagcccgtcatttattaaaagaaggtggcaggctaaacatggtacatcgtgcagagagactaatggatgtcttgtttgaaatgagaaaagtgaatattgaacctaagaaagtcgtttttatatatagtaaagtagggaaatcagcacaaacgatagtagtagaaggtcgaaaaggtggaaatcaaggtttagaaatcatgcccccattttatatttataatgaagatggtaattatagcgaagaaatgaaggaagtatattatggatagtcattttgtatatattgtaaaatgtagtgatggaagtttatatacaggatacgctaaagacgttaatgcacgtgttgaaaaacataaccgaggtcaaggagccaaatatacgaaagtaagacgtccggtgcatttagtttatcaagaaatgtatgagacaaagtctgaagcattgaagcgtgaatatgaaattaaaacttataccagacaaaagaaattgcgattaattaaggagcgatagtatggctgtattatatttagtgggcacaccaattggtaatttagcagatattacttatagagcagttgatgtattgaaacgtgttgatatgattgcttgtgaagacactagagtaactagtaagctgtgtaatcattatgatattccaactccattaaagtcatatcacgaacataacaaggataagcagactgcttttatcattgaacagttagaattaggtcttgacgttgcgctcgtatctgatgctggattgcccttaattagtgatcctggatacgaattagtagtggcagccagagaagctaatattaaagtagagactgtgcctggacctaatgctgggctgacggctttgatggctagtggattaccttcatatgtatatacatttttaggatttttgccacgaaaagagaaagaaaaaagtgctgtattagagcaacgtatgcatgaaaatagcacattaattatatacgaatcaccgcatcgtgtgacagatacattaaaaacaattgcaaagatagatgcaacacgacaagtatcactagggcgtgaattgactaagaagttcgaacaaattgtaactgatgatgtaacacaattacaagcattgattcagcaaggcgatgtaccattgaaaggcgaattcgttatcttgattgagggtgctaaagcgaacaatgagatatcgtggtttgatgatttatctatcaatgagcatgttgatcattatattcaaacttcacagatgaaaccaaaacaagctattaaaaaagttgctgaagaacgacaacttaaaacgaatgaagtatataatatttatcatcaaataagttaatcactttatcgattatatgaaattttaaacgattttataaacgcaagctgtaattttaaatggtaagttatcattttgtattgatactgataaaatgatgttgactatgataaaaaaatgatgacatcgacgttttttaatgtaaaataaatacattgaaagtaataaataccttaacattgaataagatgaaaatgagatgacgagataaatgttcgcgtccgttgaaatgcatagaaatcttagatattatttgaagtgagacattacgaggaggaacagttatggctaaagaaacattttatataacaaccccaatatactatcctagtgggaatttacatataggacatgcatattctacagtggctggagatgttattgcaagatataagagaatgcaaggatatgatgttcgttatttgactggaacggatgaacacggtcaaaaaattcaagaaaaagctcaaaaagctggtaagacagaaattgaatatttggatgagatgattgctggaattaaacaattgtgggctaagcttgaaatttcaaatgatgattttatcagaacaactgaagaacgtcataaacatgtcgttgagcaagtgtttgaacgtttattaaagcaaggtgatatctatttaggtgaatatgaaggttggtattctgttccggatgaaacatactatacagagtcacaattagtagacccacaatacgaaaacggtaaaattattggtggcaaaagtccagattctggacacgaagttgaactagttaaagaagaaagttatttctttaatattagtaaatatacagaccgtctattagaattctatgaccaaaacccagattttatacaaccaccatcaagaaaaaatgaaatgattaacaacttcattaaaccaggacttgctgatttggctgtttctcgtacatcatttaattggggtgtccatgttccgtctaatccaaaacatgttgtttatgtttggattgatgcgttagttaactatatttcagcattaggctatttatcagatgatgagtcactatttaacaaatactggccagcagatattcatttaatggctaaggaaattgtgcgattccactcaattatttggcctattttattgatggcattagacttaccgttacctaaaaaagtctttgcacatggttggattttgatgaaagatggaaaaatgagtaaatctaaaggtaatgtcgtagaccctaatattttaattgatcgctatggtttagatgctacacgttattatctaatgcgtgaattaccatttggttcagatggcgtatttacacctgaagcatttgttgagcgtacaaatttcgatctagcaaatgacttaggtaacttagtaaaccgtacgatttctatggttaataagtactttgatggcgaattaccagcgtatcaaggtccacttcatgaattagatgaagaaatggaagctatggctttagaaacagtgaaaagctacactgaaagcatggaaagtttgcaattttctgtggcattatctacggtatggaagtttataagtagaacgaataagtatattgacgaaacaacgccttgggtattagctaaggacgatagccaaaaagatatgttaggcaatgtaatggctcacttagttgaaaatattcgttatgcagctgtattattacgtccattcttaacacatgcgccgaaagagatttttgaacaattgaacattaacaatcctcaatttatggaatttagtagtttagagcaatatggtgtgcttactgagtcaattatggttactgggcaacctaaacctattttcccaagattggatagcgaagcggaaattgcatatatcaaagaatcaatgcaaccgcctgctactgaagaggaaaaagaagagattcctagcaaacctcaaattgatattaaagactttgataaagttgaaattaaggcagcaacgattattaatgctgaacatgttaagaagtcagataagcttttaaaaattcaagtagacttagattctgaacaaagacaaattgtatcaggaattgccaaattctatacaccagatgatattattggtaaaaaagtagcagttgttactaacctgaaaccagctaaattaatgggacaaaaatctgaaggtatgatattatctgctgaaaaagatggtgtattaaccttagtaagtttaccaagtgcaattccaaatggtgcagtgattaaataactgtatttttaaaaattaggagagataattatgttaatcgatacacatgtccatttaaatgatgagcaatacgatgatgatttgagtgaagtgattacacgtgctagagaagcaggtgttgatcgtatgtttgtagttggttttaacaaatcgacaattgaacgcgcgatgaaattaatcgatgagtatgattttttatatggcattatcggttggcatccagttgatgcaattgattttacagaagaacacctggaatggattgaatctttggctcagcatccaaaagtgattggtattggtgaaatgggattagattatcactgggataaatctcctgcagatgttcaaaaggaagtttttagaaagcaaattgctttagctaagcgtttgaagttaccaattatcattcataaccgtgaagcaactcaagactgtatcgatatcttattggaggagcatgctgaagaggtaggcgggattatgcatagctttagtggttctccagaaattgcagatattgtaactaataagctgaatttttatatttcattaggaggacctgtgacatttaaaaatgctaaacagcctaaagaagttgctaagcatgtgtcaatggagcgtttgctagttgaaaccgatgcaccgtatctttcgccacatccgtatagagggaagcgaaatgaaccggcgagagtaactttagtagctgaacaaattgctgaattaaaaggcttatcttatgaagaagtgtgcgaacaaacaactaaaaatgcagagaaattgtttaatttaaattcataaagttaaaagtgagaaagatcaccgccataaatgtaaacgatgctatattcgtttaatatcctatggttctttctcacttttttaaattaaaatatcgtgcatgtggaatacgtgcgatagagatggttagagctttgaaattaagaattgtaggaaggcgttttaaatgaaaatcaatgagtttatagttgtagaaggacgagatgatactgagcgtgttaaacgagctgttgaatgtgatacgattgaaacgaatggtagtgccatcaacgaacaaactttagaagtaattagaaatgctcaacaaagtcgaggcgttattgtattaacagatccagatttcccaggagataaaattagaagtacaattactgaacatgtcaaaggtgttaaacatgcgtatattgatagagaaaaagctaaaaataaaaaagggaaaattggtgttgaacatgccgacttaattgatattaaagaagcgttaatgcatgttagttcaccctttgatgaagcttatgaatcaattgataaatctgtgctaatagagttggggttaatcgttgggaaagatgcaaggcgccgtagagaaattttaagtagaaaattgcgaatcggccattccaatggtaagcagttattgaaaaagttaaatgcatttggttataccgaagcggatgtaaggcaagctttagaagatgaatgaggaagtgaaaatgttggataataaagatattgcaacaccatcaagaacgcgagcgttgttagataaatatggctttaattttaaaaaaagtttaggacagaactttttgatagatgtgaatatcattaataatatcattgatgcaagtgatattgatgcacaaactggggtgattgaaattggtccaggcatggggtcattgacagaacaattggctagacatgctaaaagagtattggcatttgaaattgatcaacgtttaatacctgtattaaatgatacactatcaccttatgataatgtgacggtgattaatgaagatattttaaaagcgaatattaaagaagctgttgaaaatcatttacaagattgcgaaaaaataatggttgttgcaaacctgccgtactatattacgacgccaattttattaaatttaatgcaacaagatataccaattgatggctacgtggtgatgatgcaaaaagaagtgggcgaacgcttaaatgctgaagtaggttcaaaagcatatggttcgttatcaattgtcgtacaatactatacagagactagtaaagtattaacggtacctaaatctgtatttatgccaccacctaatgttgattcaatagttgtaaaactgatgcagagaactgaaccgttagtaacagtagataacgaggaagcattctttaagttagcaaaagcagcatttgcacaaagaagaaagacaattaacaataactatcaaaattattttaaagatggtaaacaacacaaagaagtgattttacaatggttggaacaagcaggtattgatccaagacgtcgcggtgaaacgctatctattcaagattttgctaaattgtatgaagaaaagaaaaaattccctcaattagaaaattaaatgattgacaaagcaaagcactattgttaaaatttaaattttgtttgacgaaaacgctgcaaatatggtattatgtaacttgtagcgaggtggagcaatatgccaaaatcaattttggacatcaaaaattctattgattgtcatgtaggaaatcgtattgtactgaaagccaatggaggccgtaagaaaacaataaaacgttctggaattttaaaagaaacatatccgtcagttttcattgttgagttagatcaagacaaacacaactttgagagagtatcttatacatacactgatgtgttaactgaaaatgttcaagtttcatttgaagaggataatcatcacgaatcaattgcacactaaataagacatatagagatgttagacgtttcttagtataagaagtaaatattatgataattatttgagtgttgggcgttatgttcaatactctttttatttacaaaatgtttaacactgatgtttcgcttatagatttttcagtaaatggatacttgtatttataaacacaaatacaagtaaatactaagtaattagatggagaaaattacttttttattaaaaaaacactaaaaaacaaattaaaatgtcaaatattaattctctttatgttaaaatcatcatattaagataacgaaaagagggcggaaaatgatatatgaaacggcaccagccaaaattaattttacgctcgatacactttttaaaagaaatgatggctatcatgagattgaaatgataatgacaacagttgatttaaatgatcgtttaacttttcataaaagaaaagatcgaaagatagttgttgagattgaacataattatgtgccttctaatcataaaaatctcgcatatcgtgcagcgcaactatttattgagcaatatcaactaaagcaaggtgtaacaatttctatcgataaagaaatacctgtttctgctggcttagctggaggttcggctgatgcagcagcaacgttaagaggattgaatcgactttttgatataggggcgagtttggaagaattggctctactaggcagtaaaatcgggacagatattccgttttgtatttataataaaactgcactatgtactggaagaggagagaaaatcgagtttttaaataaaccaccttcagcttgggtgattcttgctaaaccaaacttaggcatatcatcaccagatatatttaagttgatcaatttagataagcgttacgacgtacatacgaaaatgtgttatgaggccttagaaaatcgagattatcaacaattatgtcaaagtttgtctaatcgattagagccaatttctgtttcaaaacacccacaaatcgataaattaaaaaataatatgttgaaaagtggtgcagatggtgcgttaatgagtggaagcggaccgactgtgtatgggctagcacgaaaagaaagccaagcaaaaaatatttataatgcagttaacggttgttgtaatgaagtgtacttagttagactattaggatagaagggttgaaaagatgagatataaacgaagcgagagaattgtttttatgacgcaatatttgatgaaccatccgaataaattgattccattaactttttttgtgaaaaaatttaaacaggcgaagtcttcaataagtgaagatgtccaaattataaaaaatacattccaaaaagaaaagttaggtacagtaattactactgctggcgcaagtggtggtgttacgtataaaccaatgatgagtaaagaagaggcgactgaagttgttaatgaggtcattactctattagaagagaaagaacgtttgttacctggcgggtatttatttttatcagatttggtaggtaatccatcgctactaaacaaagttggtaagttaattgccagtatttacatggaagaaaaattagatgctgttgttaccattgcgacaaaaggtatttcattggcaaatgcggttgctaatattttaaatttaccagtagtagtgattagaaaagacaacaaggtgactgaaggttctacagtttcaattaattacgtttcaggatcttcaagaaaaatagagacaatggtactttcgaagagaactttagcagaaaattcaaatgttttagttgtcgatgattttatgagggctggtggctctattaatggtgttatgaatttaatgaatgagtttaaagcccatgtaaaaggggtatcagtacttgtagaatcaaaagaagttaaacaaagattgattgaagattatacttccttagtgaaattatctgatgtagatgaatataatcaagagtttaacgtagaacctggcaacagtttatctaagttttcataaaaggagttttagtattatgaaaatcattaacacaacaagattaccggaagcacttggaccatattcgcatgcaacagttgtgaatggtatggtttatacttctggtcagattccattgaatgttgatggggaaatcgtaagcgctgatgttcaagcacagacaaaacaagttttagaaaatttaaaggttgttttggaagaagcaggatctgatttgaattctgttgcgaaagcgaccattttcattaaagatatgaatgatttccaaaaaataaatgaagtgtatggtcaatattttaatgaacacaagccagcgcgtagttgtgtagaggttgcgcgtttgccaaaagatgtgaaagtagaaattgaattagtaagtaaaattaaggaattataattttcgattaatatgtttaatcaagcttctaaataaaacagagagatatatactataggggggctcactacatgaaagtgacagatgtaagacttagaaaaatacaaacagatggacgaatgaaagcactcgtttccattacattagatgaagctttcgtaattcatgatttacgtgtaattgaaggaaactctggcttgttcgttgcaatgccaagtaaacgtacaccagatggtgaattccgcgacatcgcgcatcctattaattcagatatgagacaagaaattcaagatgcagtgatgaaagtatatgatgaaacagatgaagtagtaccagataaaaacgctacatcagaagattcagaagaagcttaatcaattttatatttagcgatgtaatacatttgcaataagttgatttgatactgtcgataaagcataaagctttgtcggcagtttttttagtttgtattaatgtttttttatttttaatgaaaggctaataaatatatacgttaacagattatgatgatatgaaaattattgattcattgctgataaaaattgtgtttgaatgatgctcgtatttttgaagtaagaaaaaagttgtttttaaaattacaacgaattaaaaacaatgccttttatatgttgaaagagtattgcagattaaattataataatgacgaagtgtaaaatttaatgggggttaatgttcatgcgaagacacgcgataattttggcagcaggtaaaggcacaagaatgaaatctaaaaagtataaagtgctacacgaggttgctgggaaacctatggtcgaacatgtattggaaagtgtgaaaggctctggtgtcgatcaagttgtaaccatcgtaggacatggtgctgaaagtgtaaaaggacatttaggcgagcgttctttatacagttttcaagaggaacaactcggtactgcgcatgcagtgcaaatggcgaaatcacacttagaagacaaggaaggtacgacgatcgttgtatgtggtgacacaccgctcatcacaaaggaaacattagaaacattgattgcgcatcatgaggatgctaatgctcaagcaactgtattatctgcatcgattcaacaaccatatggatacggaagaatcgttcgaaatgcgtcaggtcgtttagaacgcatagttgaagagaaagatgcaacgcaagctgaaaaggatattaatgaaattagttcaggtatttttgcgtttaataataaaacgttgtttgaaaaattaacacaagtgaaaaatgataatgcgcaaggtgaatattacctccctgatgtattgtcgttaattttaaatgatggcggcatcgtagaagtctatcgtaccaatgatgttgaagaaatcatgggtgtaaatgatcgtgtaatgcttagtcaggctgagaaggcgatgcaacgtcgtacgaatcattatcacatgctaaatggtgtgacaatcatcgatcctgacagcacttatattggtccagacgttacaattggtagtgatacagtcattgaaccaggcgtacgaattaatggtcgtacagaaattggcgaagatgttgttattggtcagtactctgaaattaacaatagtacgattgaaaatggtgcatgtattcaacagtctgttgttaatgatgctagcgtaggagcgaatactaaggtcggaccgtttgcgcaattgagaccaggcgcgcaattaggtgcagatgttaaggttggaaattttgtagaaattaaaaaagcagatcttaaagatggtgccaaggtttcacatttaagttatattggcgatgctgtaattggtgaacgtactaatattggttgcggaacgattacagttaactatgatggtgaaaataaatttaaaactatcgtcggcaaagattcatttgtaggttgcaatgttaatttagtagcacctgtaacaattggtgatgatgtattggtggcagctggttccacaatcacagatgacgtaccaaatgacagtttagctgtggcaagagcaagacaaacaacaaaagaaggatataggaaataatcatttacgtatttaaaatgactaggataaaaggataatcctatgtaatattaatgtaatctttatgatttaatgattcacatagtaatggagttacattttatatataatagtaattgcgtaagtaaataattggaggactataaatgttaaataatgaatataagaattcgtcattaaagattttttcattgaaaggaaacgaagcattagcgcaagaagttgctgaccaagtaggaattgaactaggtaaatgttcagttaaacgttttagtgatggagaaattcaaattaatatcgaagagagtattcgtggttgtgacgtatttattattcaaccaacatcatatcctgtgaatctacatttaatggaattattaattatgattgacgcttgtaaacgtgcttctgcagcaacaatcaatattgtagtgccatattatggatatgcaagacaagatagaaaagcccgtagccgtgagccaatcacagctaaattagttgcaaacttaatcgaaacagctggcgcaactcgtatgattgcgttagacttacatgcaccacaaattcaaggattctttgatattccaattgaccacttaatgggtgtgccaattcttgctaaacatttcaaagatgatccgaatattaacccagaagaatgtgtcgttgtttcaccagaccatggcggtgttacacgtgcacgtaaattagctgacattttaaaaactccaattgcaattatagataaacgtcgtcctagaccaaatgttgctgaagtgatgaacattgttggtgagattgaaggacgtacggcaattattattgacgatattattgatacagcaggtacaatcactttagctgcacaagcattaaaagataaaggtgctaaagaagtatatgcttgttgtacacaccctgttttatcaggaccggctaaagaacgtatcgaaaattctgctataaaagaattaatcgtaacaaactcaattcatttagatgaagaccgcaaaccatctaacactaaagaattatctgttgctggtttaatcgcacaagctatcattcgtgtatacgaaagagaatcagttagcgtattatttgactaatatttaaaaggcgtttgacgaacatattccaaacgtgtataatagtttcgttcgtgattatacgaataaataaacacttgcaagcaacgatgatgttgatgggtaagtgaggtgctcgttttgagcaaaaatgaaaggtggaaatgagaatggcttcattaaagtcaatcatccgtcaaggtaaacaaacacgttcagatcttaaacaattaagaaaatctggtaaagtaccagcagtagtatacggttacggtactaaaaacgtgtcagttaaagttgatgaagtagaattcatcaaagttatccgtgaagtaggtcgtaacggtgttatcgaattaggcgttggttctaaaactatcaaagttatggttgcagactaccaattcgatccacttaaaaaccaaattactcacattgacttcttagcaatcaatatgagtgaagaacgtactgttgaagtaccagttcaattagttggtgaagcagtaggcgctaaagaaggcggcgtagttgaacaaccattattcaacttagaagtaactgctactccagacaatattccagaagcaatcgaagtagacattactgaattaaacattaacgacagcttaactgttgctgatgttaaagtaactggcgacttcaaaatcgaaaacgattcagctgaatcagtagtaacagtagttgctccaactgaagaaccaactgaagaagaaatcgaagctatggaaggcgaacaacaaactgaagaaccagaagttgttggcgaaagcaaagaagacgaagaaaaaactgaagagtaattttaatctgttacattaaagtttttatactttgtttaacaagcactgtgcttattttaatataagcatggtgctttttgtgttattataaagtttaattaattttagtgagtaaaagacattaaactcaacaatgatacatcataaaaattttaatgtactcgattttaaaatacatacttactaagctaaagaataatgataattgatggcaatggcggaaaatagatgttgtcattataataataaatgaaacaattatgttggaggtaaacacgcatgaaatgtattgtaggtctaggtaatataggtaaacgttttgaacttacaagacataatatcggctttgaagtcgttgattatattttagagaaaaataatttttcattagataaacaaaagtttaaaggtgcatatacaattgaacgaatgaacggcgataaagtgttatttatcgaaccaatgacaatgatgaatttgtcaggagaagcagttgcaccgattatggattattacaatgttaatccagaagatttaattgtcttatatgatgatttagatttagaacaaggacaagttcgcttaagacaaaaaggaagtgcgggcggtcacaatggtatgaaatcaattattaaaatgcttggtacagaccaatttaaacgtattcgtattggtgtgggaagaccaacgaatggtatgacggtacctgattatgttttacaacgcttttcaaatgatgaaatggtaacgatggaaaaagttatcgaacacgcagcacgcgcaattgaaaagtttgttgaaacatcacgatttgaccatgttatgaatgaatttaatggtgaagtgaaataatgacaatattgacaacgcttataaaagaagataatcattttcaagaccttaatcaggtatttggacaagcaaacacactagtaactggtctttccccgtcagctaaagtgacgatgattgctgaaaaatatgcacaaagtaatcaacagttattattaattaccaataatttataccaagcagataaattagaaacagatttacttcaatttatagatgctgaagaattgtataagtatcctgtgcaagatattatgaccgaagagttttcaacacaaagccctcaactgatgagtgaacgtattagaactttaactgcgttagctcaaggtaagaaagggttatttatcgttcctttaaatggtttgaaaaagtggttaactcctgttgaaatgtggcaaaatcaccaaatgacattgcgtgttggtgaggatatcgatgtggaccaatttcttaacaaattagttaatatggggtacaaacgggaatccgtggtatcgcatattggtgaattctcattgcgaggaggtattatcgatatctttccgctaattggggaaccaatcagaattgagctatttgataccaaaattgattctattcgggattttgatgttgaaacgcagcgttccaaagataatgttgaagaagtcgatatcacaactgcaagtgattatatcattactgaagaagtgatcagccatcttaaagaagagttaaaaactgcatatgaaaatacaagacccaaaatagataaatcagtgcgcaatgatttgaaagaaacgtatgaaagctttaaattattcgaaagtacatactttgatcatcaaatactacgtcgcttagtagcgtttatgtatgaaacaccttcgacaattattgagtatttccaaaaagatgcaatcattgcagttgatgaatttaatcgtattaaagaaactgaagaaagtttaacagtagagtctgattcgtttattagcaatattattgaaagtggtaatggatttataggacaaagttttataaaatatgatgattttgaaacattgattgaaggctatcctgtcacttatttttcattattcgctacaacaatgccgataaaactaaatcatattattaaattttcatgtaaacctgttcaacaattttatgggcaatatgacattatgcgttctgaatttcaacgatatgttaatcaaaactatcatatcgtggttttggtcgaaaccgaaactaaagttgaacgtatgcaagcgatgttaagtgaaatgcatattccatcaataacaaaattgcatcgctcaatgtcatcgggacaagcagtgattattgagggcagtttatctgaaggatttgaactacctgatatgggattagttgtcattactgagcgtgagctttttaaatcaaaacagaaaaagcaacgaaaacgtacgaaagctatctcaaatgctgaaaaaattaagtcttaccaagatttaaatgtgggagattatattgttcatgtgcatcatggtgttggtagatatttaggtgttgagacgctcgaagtggggcaaacgcatcgtgattatattaaattgcaatataaaggtacggatcaactatttgttccagtagatcaaatggatcaagttcaaaaatatgtagcttcggaagataagacgccaaaattaaataaactcggtggcagtgaatggaaaaaaacaaaagctaaagttcaacaaagtgttgaagatattgctgaagagttgattgatttatataaagaaagagaaatggcagaaggttatcaatatggggaagacacagctgagcaaacaacatttgaattagattttccatatgaacttacgcctgaccaagctaaatctatcgatgaaattaaagatgacatgcaaaaatcgcgtccaatggatcgcttgctatgtggtgatgttggttatggtaaaactgaagttgcagtgagagcagcattcaaagctgtaatggaaggaaagcaggttgcatttttagttcctacaactattttagctcagcaacattatgagacgttaattgagcgtatgcaagattttcctgttgaaattcaattaatgagtcgttttagaacgcctaaagagataaaacaaactaaggaaggacttaaaactggatttgttgacatagttgttggtacacacaaattacttagtaaagatatacagtataaagatttagggctgttgattgtagatgaagaacaacgatttggtgtacgccataaagagcgtattaaaacattaaaacataatgtagatgtactaacattgactgcaaccccaatacctagaacattgcatatgagtatgctaggtgtgcgcgatttgtcagtgattgaaacgccgccagaaaatcgtttcccagttcaaacatatgtattagaacagaacatgagttttatcaaagaagctttagaaagagaactatcccgtgatggccaagtgttttatctttataataaagtgcaatccatttatgaaaaacgagaacaactccagatgttaatgccagatgctaacattgcagttgctcatggacaaatgacagagcgcgatttagaagaaacgatgttaagttttatcaataatgaatatgatattttagtaacgacgacgattattgaaacaggtgtcgatgtcccaaatgcaaatactttgatcattgaagatgcagatcgctttggattgagtcagttgtatcaattaagaggtcgtgttggtcgttcaagtcgtattggttatgcatacttcttacatccagcaaataaggtactaactgagactgcagaagatcgattacaagcgattaaagaatttacggagttaggctcaggatttaagattgcgatgcgtgatttgaacattcgtggtgctggtaatttgttaggtaaacaacagcacggctttattgatacagttggatttgatttgtacagtcaaatgttagaagaagctgtaaatgaaaaacgtggtattaaggaaccagaatctgaggtgccagaagtcgaagttgatttaaacttggatgcatatttgccgacagaatatattgcaaatgaacaagctaaaattgaaatttataaaaagctacgaaaaactgaaacatttgatcaaattatcgacattaaagatgaattaattgatcgttttaatgattatcctgttgaagtagcacgtttgcttgatatagtggaaataaaagtacacgcattacattcaggtatcacgttgattaaagataaagggaaaataattgatattcatttatctgtaaaagccactgaaaatattgatggcgaagtgctgttcaaagcaacacaacctttaggtagaacaatgaaggttggtgttcaaaataatgcaatgacaattactttaacgaaacaaaatcaatggcttgatagtttgaagtttttagttaagtgcattgaagaaagtatgagaatcagtgatgaagcataaagaagcatttaatggcgttgtcgtgttaactgctgcattaattgtcattaaaattctgagtgctgtatatcgaattccatatcaaaatatattaggtgatacaggtttgtatgcatatcaacaagtgtatccaattgtagcattaggaatgatattatcgatgaatgccattcctagtgcaattacacaaaatatagggaagtatcatagtgacgaagcatatgcaaaagcggtcgcttatatacaattagttggtatattattatttattgctatttttgtgtttgcgaacaatattgcacatatgatgggtgatagccatttaacaccaatgattcaagcagcaagtttaagctttatatttataggtatgcttggcgtgttaagaggttattatcaatctgcaaataatatgacagttccggctatttcccaggttatagaacaagttatacgagtaggtattatcattgttactattgttatttttgtagacagaggttggacgatatatgaagcgggaacaattgctattttagcatcaacgataggttttttaggttcttcaatttatttagtagcgcaccgaccttttaagtttaaaatggtaaataacactgcaaagattgtttggaaacagttcgcactttcggttttgattttcgctatcagtcaattaatcgtaattttatggcaagtgattgatagtgttactattattaagtcacttcaagcgatacgcgtgccattcgatgttgccataactgaaaaaggagtctatgaccgtggtgcatcatttattcagatgggattgattgtaactacaacatttagttttgcgctcattcctctgttaagtgacgcaatcaaaatgaataatcaggtacttatgaatcgttatgcaaatgcgtcattaaagattacgattttaataagtacagcagcgggaataggattaattaatttattgcctttaatgaacggtgtgttttttaagacgaatgatttaaccttaacgttaagtgtttatatgattacggtcatttgtgtatcgttaattatgatggatatggctttattacaagcgcaacatgctgtgagacctatttttgttggtatgacggcaggattggttattaaatttatacttaatatcattttgattcgtttaagtggcattattggtgcgagcattagtactgttgtatcattaattatattcggtacgattatccatattgctgtcacgagaaaataccacttacatgcgatgagacgattttttatcaatgttgttttaggtatggtatttatgtcgattgttgttcaatgcgtgttaaacatagtgacaacacacggtagattcactggactcattgaattattatgtgcagcagtattaggtatcattgcattgtttttctatatttttagatttaatgttttgacatataaagagttaacttatttaccatttggttcaaagttgtatcaaattaagaaaggaagacgttgatggcacataccattacgattgttggcttaggaaactatggcattgatgatttgccgctagggatatataaatttttaaagacacaagataaagtttatgcaagaacgttagatcatccagttatagaatcattgcaagatgaattaacatttcagagttttgaccatgtttatgaagcacatgaccaatttgaagatgtctataatgatattgtggcgcaattggttgaagctgctaatgaaaaagatattgtctatgcggttccgggtcatcctagagttgctgagacaactacagtgaaattactggctttagcaaaggacaatactgatatagatgtgaaagttttaggtggtaaaagctttattgatgatgtgtttgaagcagttaatgtagatccaaatgatggcttcacactgttagatgcgacatcattacaagaagtaacacttaatgttagaacgcatacattgattacacaagtttatagtgcaatggttgctgctaatttgaaaatcactttaatggaacgatatcctgatgattaccctgttcaaattgtcactggtgcacgaagcgatggtgcggataacgttgtgacatgcccattatatgaattggatcatgatgaaaatgcattcaataatttgacgagtgtattcgtaccaaaaatcataacatcgacatatttgtatcatgactttgattttgcaacggaagtgattgatactttagttgatgaagataaaggttgtccatgggataaagtgcaaacgcatgaaacgcttaagcgttatttacttgaagaaacatttgaattgttcgaagctattgacaatgaagatgattggcatatgattgaagagctaggagatattttattacaagtgttattgcatactagtattggtaaaaaagaagggtatatcgacattaaagaagtgattacaagtcttaatgctaaaatgattcgtagacacccacacatatttggtgatgccaatgctgaaactatcgatgacttaaaagaaatttggtctaaggcgaaagatgctgaaggtaaacagccaagagttaaatttgaaaaagtatttgcagagcattttttaaatttatatgagaagacgaaggataagtcatttgatgaggcctcgttaaagcagtggctagaaaaaggggagagtaatacatgagattagataaatatttaaaagtatcacggttaataaagcgacgtacgctagcaaaagaagtaagtgatcaaggtagaattacaataaatggtaatgttgctaaagctggatcggatgttaaagttgaagatgtgctgacgattcgctttggtcaaaaattagtaacagttaaagtaactgcattaaatgaacatgcatctaaagataacgcgaagggcatgtatgaaatcattgaagagcgtcgacttgaagaagcgtaaattggaggtgacaagcaatgaaaaataaagtagaacatatagaaaatcagtacacgtcgcaagagaataagaaaaaacaacgtcaaaaaatgaaaatgcgtgttgttcgtaggcgtattacagtatttgcgggcgtattacttgcgataattgttgttttatcaatcttgcttgttgtccaaaaacatcgcaatgatatcgatgcacaggagcgaaaagcgaaagaagcacagtttcaaaagcaacaaaatgaagaaattgcgttaaaagaaaagttgaataatctgaatgacaaagattatattgaaaaaattgcgcgtgatgattattacttaagcaacaaaggtgaagtgatttttaggttgccagaagacaaagattcgtctagctcaaaatcttcgaaaaaataaatccaaattgattcaaaattatccgagtatagacattgtgaaaaaatccaaacaaggatataataagggaaaatcgaatcaaatcgggaggatttatttaacatatgtcaatcgaagttggaaataagcttaaaggtaaagtcactggtattaaaaagtttggtgcattcgtagaattacctgaaggaaaaagtggtttagttcacattagtgaagtcgcagataattatgttgaaaacgtagaagagcacctttctgttggtgatgaagtagacgtaaaagtattatctattgctgatgatggaaaaattagtctttcaattaagaaagctaaagaccgtccacgtagacaacatacgagtaaaccaagtcatcaaaaaccagtgcaaaaagccgaagattttgaaaagaaattaagcaatttcttaaaagatagtgaagataaattaacttcaatcaaacgtcaaacagaatctagacgcggtggcaaaggttcaagacgttaattaaaataaataaagactgtttcgataaggaatatatttagaatgatgcgtatcgaataatcgattgcagcgttagacaatctaagactgtttcttaaataaggagcagtctcttttatttgtaatgatataactaagacttataccatttttgaaaattgtaaaagtgaggtgatgttatgcagttaaatagtaatggttggcatgttgatgaccatattgttgtcgctgtttctacaggtattgatagtatgtgtttattgtatcaactactaaatgattataaagatagttatagaaaactaacatgcttacatgtcaatcatggcgttaggtcagcttcaatcgaggaagccagatttttagaagtatactgcgaacgtcatcacatcgatttacatatcaaaaagttagatttgtcgcatagtctcgaccgaaataacagcattcagaatgaagctcgaattaaacgttacgaatggtttgatgaaatgatgaatgtattagaagcggatgtattgctaacggcgcatcatttggacgatcaattagaaactattatgtatcgtatttttaatgggaaatcaacgcgtaataaactaggatttgatgagttatcgaagcgaaaaggttatcagatttatcgaccacttttagctgtctctaaaaaagaaataaaacaattccaagagagatatcatattccatattttgaagatgaatctaataaagataacaaatatgttagaaatgatattcgtaatagaattattccagctattgatgaaaataatcaacttaaagcatcgcatttattaaaattaaaacaatggcatgatgaacaatatgatattttgcaatattcagctaaacaatttattcaagaatttgtgaagtttgatgaacagtcaaaatatttagaggtttctagacaagcttttaataacttaccaaactcattaaagatggttgtgttggattgcctactatcaaagtattatgagttgtttaatattagtgctaaaacatacgaagagtggtttaaacaatttagtagtaagaaagcacaattcagtattaatctcacggataaatggataattcaaattgcatatggtaaattaataataatggctaaaaataatggcgatacatattttagagttcaaactattgaaaagccaggtaattatatttttaacaaatatcgattagagatacattctaatttaccaaaatgtttatttccgcttacagtgagaacacgacaaagtggcgatacatttaaactgaatgggcgcgatggttataagaaagtgaatcgcctgtttatagattgtaaagtgcaacagtgggttcgggatcaaatgccaatcgtattggataaacaacagcgcattattgcggtaggagatttatatcaacaacaaacaataaaacaatggattataattagtaaaaatggagatgaatagcgttatgcataatgatttgaaagaagtattgttaactgaagaagatattcaaaatatctgtaaggaattgggagcacaattaacaaaggattatcaaggtaaaccattagtatgcgtgggtatcttaaaaggctcagcaatgtttatgtcagatttaattaaacgaattgatacccatttatcaattgatttcatggatgtttctagttatcacggaggcactgagtcaactggtgaagttcaaatcattaaagatttaggttcttctattgaaaataaagacgtattaattattgaagatatcttagagactggtactacacttaagtcaattactgaattattacaatctagaaaagttaattcattagaaatagttactttattagataaaccaaaccgtcgtaaagcggacattgaagctaagtatgtaggtaaaaaaataccagatgaatttgttgttggttacggtttagattatcgtgaattataccgaaacttaccatatatcggtacgttaaaacctgaagtgtattcaaattaattttttaatcaatttcagttattattactatgcgtttgagaaataatagtgtagactcaaaaatatgaaaaatgtatttcatatatatttaattttagacaagacatatgtcttgaaaagttgaaaaatatagagattgataaaactaatacgggtgtgaatgacattgatgttaagctcaattactagcttataaaacatgtcatatgttacaatttttgttagttttattatgggaagtaggaggaaatgacgcatgcagaaagcttttcgcaatgtgctagttatcgtaataataggcgttattatttttggtctattttcatatttaaacggtaatggaaatatgccgaaacagcttacatataatcaatttactgagaagttggaaaaaggtgaccttaaaactttagaaatccaaccacaacaaaatgtctatatggtaagtggtaaaacgaaaaatgatgaagactattcatcaactattttatataacaacgaaaaagaattacaaaaaattactgatgctgctaaaaagcaaaacggtgtaaaattaacgattaaagaagaagaaaaacaaagtgtctttgtgagtatactttcaacattaattccagttgtagtcatagcgttattatttattttcttcctaagccaagcacaaggtggcggtagtggcggtcgtatgatgaactttggtaaatctaaagcaaaaatgtacgataataataaacgtcgtgttcgtttctctgatgtagcaggggcagatgaagaaaaacaagaattaattgaaattgttgatttcttgaaagataataaaaaattcaaagaaatgggatctaggattcctaaaggtgtcttacttgttggacctccaggtactggtaaaacattacttgctagagcggttgcaggtgaagctggcgcaccattcttctctattagtggttcagactttgtagagatgtttgttggtgttggtgcgagccgtgttcgtgacttattcgataatgctaagaaaaacgcgccttgtatcatctttatcgatgagattgatgctgttggtcgtcaacgtggtgcaggtgttggtggcggtcatgatgaacgtgaacaaaccctaaaccaattattagttgaaatggatggtttcggtgaaaatgaaggtatcattatgatagctgctacaaaccgtcctgatatccttgacccagccttattacgtccaggtcgttttgatagacaaattcaagttggtcgtccagatgtgaaaggccgtgaagcaattcttcatgttcatgctaaaaacaaaccacttgatgaaacggttgatttaaaagcaatttcacaacgtacacctggtttctcaggtgctgatttagagaacttattaaatgaagcatctttaattgctgtacgtgaaggtaaaaagaaaattgacatgagagatatcgaagaggcaacggatagagttatagccggacctgctaagaaatctcgagttatttctaagaaagaacgtaatattgttgctcatcacgaagctggtcatacaattatcggtatggtacttgatgaggcagaagtagtgcataaagttactattgttccacgtggacaagcaggtggttatgcaatgatgctacctaaacaagatcgtttcttaatgactgaacaagagttattagataaaatctgtggtttacttggtggacgtgtatcagaagatattaactttaacgaagtatcaacaggtgcttcaaatgacttcgaacgtgcaacacaaatcgcacgctcaatggttacgcaatatggtatgagtaaaaaattaggaccattacagttcggtcatagcaatggtcaagtattcttaggtaaagatatgcaaggtgagcctaattattcaagccaaatcgcatatgaaattgataaagaagttcaacgaatcgttaaagaacaatacgaacgttgtaaacaaattttattagagcacaaagaacaattaattttaattgctgaaacattattaacagaagaaacattagttgctgaacaaattcaatcattattctacgaaggtaaattacctgaaattgattatgatgcagctaaagttgttaaagatgaagattctgaatttaatgatggtaaattcggtaaatcttatgaagagattcgtaaagagcaattagaagatggacaacgtgacgaaagtgaagatcgtaaagaagaaaaagatattgctgaggataaaaaagaagctgataaatctgatgaaaaagatgaaccagcacatcgacaagccccaaatatcgaaaaaccttacgatccaaatcacccagacaataaataatcgattatattcagtacctctttctatgataaagttatagaaagaggtacttttatcgtttttgaaaatacgtattagattttaagtcgttgaattgttatagcagaaaataattgtaaaacaagttacttcattatttagaatgatgggtgtagaataagtacaattgttgcattttatgaagtaaagtaattttttaaatatagagtaatagaggagattgaaataatgacacacgattatattgttaaagcattagcatttgatggagagattagggcttatgctgctttgacaactgaaactgttcaagaagcacaaacgagacattatacatggccgacagcatctgctgcaatgggaagaacaatgacagcaacagctatgatgggcgcaatgttgaaaggtgatcaaaaattaactgtcactgtagatggccaaggacctattggacgaattattgccgatgcaaatgctaaaggcgaggtgcgtgcttatgtagaccatccacaaactcattttccattaaatgagcaaggtaaacttgatgtaagacgagcagtagggacaaatggatctattatggttgttaaagacgttggaatgaaagactatttctctggagcaagtccaattgtttcaggagaacttggtgaagattttacttattattatgctacaagtgaacaaacaccttcatcggtaggtcttggtgtattggtaaatcctgataatacgattaaagcagcaggaggatttatcattcaagttatgccaggtgccaaagatgaaacaatttcaaaattagaaaaagcaattagtgaaatgacaccagtttctaaattaattgaacaaggattaacgccagaaggattactaaacgaaatcttaggtgaagaccatgtgcaaattttagagaaaatgcctgttcaatttgaatgtaattgtagtcatgagaaatttttaaatgctattaaaggattgggcgaggctgagattcaaaatatgattaaagaagatcatggtgctgaagcagtatgtcatttctgtggaaataaatataaatatactgaagaagaattaaacgtgttgctagaaagtttagcgtaatttaatttaaatcaatacgctaaaatgtttatttttagcggtttagtgaaatgtagaactaaatagttgtataatccttagtgattttgtttgctttctagaatttatttgataaaataattctatatccgataaataaactaagatttcaacaactaactaaaaaggagtgttcttaatggcacaaaaaccagtagataatattactcaaattattggcggtacaccggtagtcaaattgagaaatgtagtagatgacaatgcagcagatgtttatgtaaaattggaatatcaaaatccaggtggttctgtaaaggatagaattgctttagcaatgattgaaaaagcagagcgagaaggcaaaattaaacctggcgatacaattgtagaaccaacaagtggtaatacaggtatcggtttagcatttgtatgtgctgctaaaggatataaagcagtatttactatgcccgaaacaatgagccaagagcgtcgtaatttattaaaagcatacggtgcggaattagttttaacgcctggatcagaagcgatgaaaggtgcaattaaaaaagctaaagaattgaaagaagaacatggttacttcgagccacaacaatttgaaaaccctgcgaaccctgaagttcatgagttaactacaggtcctgagttattacaacaatttgaagggaaaactatcgatgcgttcctagctggtgttggtactggtggtacgttatctggtgtaggtaaagttctgaaaaaagaatatcctaacatcgaaattgttgctatagagcctgaggcttctccagtattgagcggtggtgagccaggtccacataaattacaaggtttaggtgctggatttattccaggcactttgaatacagaaatctatgacagtattattaaagtaggaaatgatacagcgatggaaatgtctcgtcgagttgctaaagaggaaggtattttagcaggtatttcatcaggtgctgcgatttatgctgccattcaaaaagcaaaagaattaggaaaaggtaaaacagtagtaacagtattgccgagtaatggtgaacgctacttatcaacacctttatattcattcgatgactaattaatgtcatttaaaagagtgagttatctttttgagataacttgctctttttttctaccatgtatatttttaaaaatatgagcgttaaattaaacatttttctgataaaaatatccagtgaatgataagataataaacgtacatactaataactagtaaatagcaggagtaaattttattagagttaaacaatacataattaaagggtggttaacatgactaaaacaaaaattatgggcatattaaacgtcacacctgattcattctcagatggtggaaaatttaataatgttgaatcagctataaatagagtgaaagccatgatagatgaaggtgttgacattatagatgttggaggtgtttcaacgagaccaggtcatgaaatggtttcattagaagaagagatgaacagagtattacctgttgttgaagctattgtcggttttgatgtaaaaatttcagtcgatacatttcgaagtgaggttgctgaagcatgtttaaaattaggcgttgatatgattaatgatcaatgggcgggtctgtatgatcatcgtatgttccaaattgtagctaaatatgacgcggaaattattttaatgcataatggaaatggtaatcgtgatgaaccggttgtcgaagaaatgttaacatctttgttagcacaagcacatcaagctaaaatagctggtataccttcaaataaaatttggctagatccaggtataggtttcgctaaaactagaaatgaagaagccgaagttatggcaagactggatgaacttgttgcaacagaatatccagttttattagcgacaagccggaaacgtttcactaaagagatgatgggttatgatacaacaccggttgaaagagatgaagtaactgcagctacgactgcatatggtattatgaaaggcgttagagcagtacgcgttcataatgtcgagttgaatgctaaattagctaaaggtatagattttttaaaggagaatgaaaatgcaagacacaatctttcttaaaggtatgcgcttttatggatatcatggtgctttatcagctgaaaatgaaatagggcaaattttcaaagtggatgtaactttgaaagtagacttagctgaagctgggcgtactgataatgttattgatacagttcattatggtgaagtgttcgaagaggttaaatcaattatggaaggtaaggccgttaatttacttgagcatctagctgaacgtattgcaaatcgtataaattcacaatataatcgtgtaatggaaacgaaagtgagaatcactaaagaaaacccaccgattccgggtcattatgatggagtaggtatcgaaatagtgagggagaataaatgattcaagcatacttaggattaggtagtaatattggtgatagagaaagccagttaaacgatgctataaagattttgaatgaatatgatggtattaacgtatctaatatttctccgatttatgaaacagcaccagttgggtatactgagcaacctaactttttaaatttgtgtgttgaaattcaaacaacactcacagtattacaactgttggaatgttgtttgaagacagaagaatgtttacaccgtattagaaaggaacgatggggtcctagaactttagatgtggatattttgttgtatggagaagaaatgatagatttaccaaaactgtcggtgccacatccgagaatgaatgaacgtgcatttgttttaatcccattaaatgatatagcagcaaatgtcgtagaaccacgttcgaaattgaaagtgaaagatttagtttttgtagatgacagtgtaaagagatataaataatgcattgttgagaacattcatatttattgggaatagatgattgattattggagatgtttccgcattttgattatctctaaatgcatttgatttcgaattagtatatgatgatttagtatgtgttagaattaagttatttcataaaatcaaagtaagcaatatttgataaattgctgtaatttatttgggcttttgttgaagtttgtggaagataatttttatacatttacttagggttgtattaatgataatcgtattttaaatgaataagtaattcataaacgaaaacagaaattgctttattacatttacaagctcttgtaaaattaaaaaagtgataaaattgatgttatgaatataagaaaacatgccacatcataactttaaggtgtaatggttaatgataaagtattagaaacatcgaaagagatgtatgttgagcaaaaatgtctgatattttataaaactttaaaggaaaatgtttgagtgtaccagttggaatactaaaggattacaacaagttaaaggagagaaagttatgtcagaagaaatgaatgaccaaatgttggttcgacgtcaaaaattacaagaattatatgatcttggtatagacccgtttggttctaaatttgaccgttcaggtttatctagtgatttgaaagaagagtgggaccagtattctaaagaagaattggtagaaaaagaagcggatagtcatgtcgctatagctggacgattaatgactaagcgtggtaaaggtaaagcaggatttgcacacgttcaggacttagctggacaaattcaaatttacgttcgtaaagatcaagttggcgatgacgaatttgatttatggaaaaatgctgatttaggcgatatcgttggtgttgaaggtgtaatgttcaaaacaaatactggcgaattatcggttaaagcgaagaaattcacgctactaactaaatcattgcgaccattaccggataaattccacggtttacaggatattgaacagagatatcgtcaaagatatttagatttaattacgaacgaagatagcactcgtacatttattaatcgtagtaaaatcattcaagaaatgcgtaattatttaaataataaaggtttcttggaagtagaaacacctatgatgcaccaaattgctggtggagcagctgctagaccatttgtaacacatcataatgcattagatgcaacgttatacatgcgtattgctattgagttgcatttaaaacgtttaattgtcggtggacttgaaaaagtatatgaaattggtagagtattccgtaatgaaggtgtatcaactagacataaccctgaattcacaatgattgaattatatgaagcatatgcagattatcatgacattatggatttaacagaatctatggtgagacatattgccaatgaagtgttaggttctgcaaaagtacaatacaatggggaaacgattgatttagaatctgcttggactcgtttgcatattgttgatgctgtaaaagaagctactggtgtagatttttatgaagttaaaagtgatgatgaagctaaagctttagctaaagaacatggtattgaaattaaagatacaatgaaatatggtcatattttaaatgaattctttgagcaaaaagttgaagaaacacttattcagccaacgtttatctatggtcatccgactgaaatttcacctttagcgaagaaaaatcctgaagatcctagatttactgatcgtttcgaattgttcattgtaggtagagagcatgcaaatgcatttactgaattaaatgatcctattgatcaaaaaggtcgttttgaagcgcaacttgttgaaaaagcgcaaggtaatgatgaagcgcatgaaatggatgaagattacattgaagcgttagaatatggtatgcctccgacaggtggtcttggtatcggtattgacagattggttatgttattaactgactctccatcaatcagagacgtattattattcccttatatgagacaaaaataaatgacgttgattgttagtaagagctctcgtgtatacaacatgtgtatgcgagggctttcttaattatggtaattagttcgtgtttgaatgtttttgatagtaatagttaacgatagtggtgctatttttgactgttaaacaaggtagttggctgatagatgaaaatgacgatacgtatatagagtagttcggatgagaaatgttaacgatagacattgagatatcttataacaaaaattgctatattagtataatttatcttaatcagctataaaagtactttaaaattgtatagaatgtgtatggttttgtacatatgtgtatgatagaatactaaaagtgttatgaattagagggcacgagaaatgtcagttttgaagaataaaaaagttgattaaaagtgttgactttatcaattgaatgaagtaatatataaaagtcgtcaaaaacagacgaaacacactaaaagctgatgtgacaaagtttacatcaaagtgtaaaattaactattgcaccttattaattaagcgtgtatcatgaataagtaagttattttgtctggtgactatagcaaggaggtcacacctgttcccatgccgaacacagaagttaagctccttagcgtcgatggtagtcgaacttacgttccgctagagtagaacgttgccaggcaaatgacaaatcggagaattagctcagctgggagagcatctgccttacaagcagagggtcggcggttcgaacccgtcattctccaccatttattcttagatatagccggcctagctcaattggtagagcaactgacttgtaatcagtaggttgggggttcaagtcctctggccggcaccatcttttgagccattagctcagctggtagagcatctgacttttaatcagagggtcagaggttcgaatcctctatggctcattacgatttaatttttatatttagcaaaataatgcagaagtagttcagcggtagaatacaaccttgccaaggttggggtcgcgggttcgaatcccgtcttctgctccattattttgccggggtggcggaactggcagacgcacaggacttaaaatcctgcggtgagagatcaccgtaccggttcgattccggtcctcggcaccattttagcgcccgtagctcaattggatagagcgtttgactacggatcaagaggttatgggttcgactcctatcgggcgcgccatttttaaattaattgaataacgggaagtagctcagcttggtagagcacttggtttgggaccaaggggtcgcaggttcgaatcctgtcttcccgattacttcttaaattccattttatgggggcttagctcagctgggagagcgcctgctttgcacgcaggaggtcagcggttcgatcccgctagtctccaccatttattttttacacgatgaacattgaaaactgaatgacaatatgtcaacgttaattccaaaaaacgtaactataagttacaaacattatttagtatttatgagctaatcaaacatcataatttttatggagagtttgatcctggctcaggatgaacgctggcggcgtgcctaatacatgcaagtcgagcgaacggacgagaagcttgcttctctgatgttagcggcggacgggtgagtaacacgtggataacctacctataagactgggataacttcgggaaaccggagctaataccggataatattttgaaccgcatggttcaaaagtgaaagacggtcttgctgtcacttatagatggatccgcgctgcattagctagttggtaaggtaacggcttaccaaggcaacgatgcatagccgacctgagagggtgatcggccacactggaactgagacacggtccagactcctacgggaggcagcagtagggaatcttccgcaatgggcgaaagcctgacggagcaacgccgcgtgagtgatgaaggtcttcggatcgtaaaactctgttattagggaagaacatatgtgtaagtaactgtgcacatcttgacggtacctaatcagaaagccacggctaactacgtgccagcagccgcggtaatacgtaggtggcaagcgttatccggaattattgggcgtaaagcgcgcgtaggcggttttttaagtctgatgtgaaagcccacggctcaaccgtggagggtcattggaaactggaaaacttgagtgcagaagaggaaagtggaattccatgtgtagcggtgaaatgcgcagagatatggaggaacaccagtggcgaaggcgactttctggtctgtaactgacgctgatgtgcgaaagcgtggggatcaaacaggattagataccctggtagtccacgccgtaaacgatgagtgctaagtgttagggggtttccgccccttagtgctgcagctaacgcattaagcactccgcctggggagtacgaccgcaaggttgaaactcaaaggaattgacggggacccgcacaagcggtggagcatgtggtttaattcgaagcaacgcgaagaaccttaccaaatcttgacatcctttgacaactctagagatagagccttccccttcgggggacaaagtgacaggtggtgcatggttgtcgtcagctcgtgtcgtgagatgttgggttaagtcccgcaacgagcgcaacccttaagcttagttgccatcattaagttgggcactctaagttgactgccggtgacaaaccggaggaaggtggggatgacgtcaaatcatcatgccccttatgatttgggctacacacgtgctacaatggacaatacaaagggcagcgaaaccgcgaggtcaagcaaatcccataaagttgttctcagttcggattgtagtctgcaactcgactacatgaagctggaatcgctagtaatcgtagatcagcatgctacggtgaatacgttcccgggtcttgtacacaccgcccgtcacaccacgagagtttgtaacacccgaagccggtggagtaaccttttaggaactagccgtcgaaggtgggacaaatgattggggtgaagtcgtaacaaggtagccgtatcggaaggtgcggctggatcacctcctttctaaggatatattcggaacatcttcttcagaagatgcggaataacgtgacatattgtattcagttttgaatgtttatttaacattcaaaaaatgggcctatagctcagctggttagagcgcacgcctgataagcgtgaggtcggtggttcgagtccacttaggcccaccattatttgtacattgaaaactagataagtaagtaaaatatagattttaccaagcaaaaccgagtgaataaagagttttaaataagcttgaattcataagaaataatcgctagtgttcgaaagaacactcacaagattaataacgcgtttcctgtaggatggaaacatagattaagttattaagggcgcacggtggatgccttggcactagaagccgatgaaggacgttactaacgacgatatgctttggggagctgtaagtaagctttgatccagagatttccgaatggggaaacccagcatgagttatgtcatgttatcgatatgtgaatacatagcatatcagaaggcacacccggagaactgaaacatcttagtacccggaggaagagaaagaaaattcgattcccttagtagcggcgagcgaaacgggaagagcccaaaccaacaagcttgcttgttggggttgtaggacactctatacggagttacaaaggacgacattagacgaatcatctggaaagatgaatcaaagaaggtaataatcctgtagtcgaaaatgttgtctctcttgagtggatcctgagtacgacggagcacgtgaaattccgtcggaatctgggaggaccatctcctaaggctaaatactctctagtgaccgatagtgaaccagtaccgtgagggaaaggtgaaaagcaccccggaaggggagtgaaatagaacctgaaaccgtgtgcttacaagtagtcagagcccgttaatgggtgatggcgtgccttttgtagaatgaaccggcgagttacgatttgatgcaaggttaagcagtaaatgtggagccgtagcgaaagcgagtctgaatagggcgtttagtatttggtcgtagacccgaaaccaggtgatctacccttggtcaggttgaagttcaggtaacactgaatggaggaccgaaccgacttacgttgaaaagtgagcggatgaactgagggtagcggagaaattccaatcgaacctggagatagctggttctctccgaaatagctttagggctagcctcaagtgatgattattggaggtagagcactgtttggacgaggggcccctctcgggttaccgaattcagacaaactccgaatgccaattaatttaacttgggagtcagaacatgggtgataaggtccgtgttcgaaagggaaacagcccagaccaccagctaaggtcccaaaatatatgttaagtggaaaaggatgtggcgttgcccagacaactaggatgttggcttagaagcagccatcatttaaagagtgcgtaatagctcactagtcgagtgacactgcgccgaaaatgtaccggggctaaacatattaccgaagctgtggattgtcctttggacaatggtaggagagcgttctaagggcgttgaagcatgatcgtaaggacatgtggagcgcttagaagtgagaatgccggtgtgagtagcgaaagacgggtgagaatcccgtccaccgattgactaaggtttccagaggaaggctcgtccgctctgggttagtcgggtcctaagctgaggccgacaggcgtaggcgatggataacaggttgatattcctgtaccacctataatcgttttaatcgatggggggacgcagtaggataggcgaagcgtgcgattggattgcacgtctaagcagtaaggctgagtattaggcaaatccggtactcgttaaggctgagctgtgatggggagaagacattgtgtcttcgagtcgttgatttcacactgccgagaaaagcctctagatagaaaataggtgcccgtaccgcaaaccgacacaggtagtcaagatgagaattctaaggtgagcgagcgaactctcgttaaggaactcggcaaaatgaccccgtaacttcgggagaaggggtgctctttagggttaacgcccagaagagccgcagtgaataggcccaagcgactgtttatcaaaaacacaggtctctgctaaaccgtaaggtgatgtataggggctgacgcctgcccggtgctggaaggttaagaggagtggttagcttctgcgaagctacgaatcgaagccccagtaaacggcggccgtaactataacggtcctaaggtagcgaaattccttgtcgggtaagttccgacccgcacgaaaggcgtaacgatttgggcactgtctcaacgagagactcggtgaaatcatagtacctgtgaagatgcaggttacccgcgacaggacggaaagaccccgtggagctttactgtagcctgatattgaaattcggcacagcttgtacaggataggtaggagcctttgaaacgtgagcgctagcttacgtggaggcgctggtgggatactaccctagctgtgttggctttctaacccgcaccacttatcgtggtgggagacagtgtcaggcgggcagtttgactggggcggtcgcctcctaaaaggtaacggaggcgctcaaaggttccctcagaatggttggaaatcattcatagagtgtaaaggcataagggagcttgactgcgagacctacaagtcgagcagggtcgaaagacggacttagtgatccggtggttccgcatggaagggccatcgctcaacggataaaagctaccccggggataacaggcttatctcccccaagagttcacatcgacggggaggtttggcacctcgatgtcggctcatcgcatcctggggctgtagtcggtcccaagggttgggctgttcgcccattaaagcggtacgcgagctgggttcagaacgtcgtgagacagttcggtccctatccgtcgtgggcgtaggaaatttgagaggagctgtccttagtacgagaggaccgggatggacatacctctggtgtaccagttgtcgtgccaacggcatagctgggtagctatgtgtggacgggataagtgctgaaagcatctaagcatgaagcccccctcaagatgagatttcccaacttcggttataagatccctcaaagatgatgaggttaataggttcgaggtggaagcatggtgacatgtggagctgacgaatactaatcgatcgaagacttaatcaaaataaatgttttgcgaagcaaaatcacttttacttactatctagttttgaatgtataaattacattcatatgtctggtgactatagcaaggaggtcacacctgttcccatgccgaacacagaagttaagctccttagcgtcgatggtagtcgaacttacgttccgctagagtagaacgttgccaggcagttttttaatcaaattttggttaaaaaataaaatggacaagataaaaaaagttattgacttaaatgttaataaaatgtataattaattcttgtcggtaagaaaaatgaacattgaaaactgaatgacaatatgtcaacgttaattccaaaaaacgtaactataagttacaaacattatttagtatttatgagctaatcaaacatcataatttttatggagagtttgatcctggctcaggatgaacgctggcggcgtgcctaatacatgcaagtcgagcgaacggacgagaagcttgcttctctgatgttagcggcggacgggtgagtaacacgtggataacctacctataagactgggataacttcgggaaaccggagctaataccggataatattttgaaccgcatggttcaaaagtgaaagacggtcttgctgtcacttatagatggatccgcgctgcattagctagttggtaaggtaacggcttaccaaggcaacgatgcatagccgacctgagagggtgatcggccacactggaactgagacacggtccagactcctacgggaggcagcagtagggaatcttccgcaatgggcgaaagcctgacggagcaacgccgcgtgagtgatgaaggtcttcggatcgtaaaactctgttattagggaagaacatatgtgtaagtaactgtgcacatcttgacggtacctaatcagaaagccacggctaactacgtgccagcagccgcggtaatacgtaggtggcaagcgttatccggaattattgggcgtaaagcgcgcgtaggcggttttttaagtctgatgtgaaagcccacggctcaaccgtggagggtcattggaaactggaaaacttgagtgcagaagaggaaagtggaattccatgtgtagcggtgaaatgcgcagagatatggaggaacaccagtggcgaaggcgactttctggtctgtaactgacgctgatgtgcgaaagcgtggggatcaaacaggattagataccctggtagtccacgccgtaaacgatgagtgctaagtgttagggggtttccgccccttagtgctgcagctaacgcattaagcactccgcctggggagtacgaccgcaaggttgaaactcaaaggaattgacggggacccgcacaagcggtggagcatgtggtttaattcgaagcaacgcgaagaaccttaccaaatcttgacatcctttgacaactctagagatagagctttccccttcgggggacaaagtgacaggtggtgcatggttgtcgtcagctcgtgtcgtgagatgttgggttaagtcccgcaacgagcgcaacccttaagcttagttgccatcattaagttgggcactctaagttgactgccggtgacaaaccggaggaaggtggggatgacgtcaaatcatcatgccccttatgatttgggctacacacgtgctacaatggacaatacaaagggcagcgaaaccgcgaggtcaagcaaatcccataaagttgttctcagttcggattgtagtctgcaactcgactacatgaagctggaatcgctagtaatcgtagatcagcatgctacggtgaatacgttcccgggtcttgtacacaccgcccgtcacaccacgagagtttgtaacacccgaagccggtggagtaaccttttaggagctagccgtcgaaggtgggacaaatgattggggtgaagtcgtaacaaggtagccgtatcggaaggtgcggctggatcacctcctttctaaggatatattcggaacatcttcttcagaagatgcggaataacgtgacatattgtattcagttttgaatgtttatttaacattcaaatattttttggttaaagtgatattgcttttgaaaataaagcagtatgcgagcgcttgactaaaaagaaattgtacattgaaaactagataagtaagtaaaatatagattttaccaagcaaaaccgagtgaataaagagttttaaataagcttgaattcataagaaataatcgctagtgttcgaaagaacactcacaagattaataacgcgtttcctgtaggatggaaacatagattaagttattaagggcgcacggtggatgccttggcactagaagccgatgaaggacgttactaacgacgatatgctttggggagctgtaagtaagctttgatccagagatttccgaatggggaaacccagcatgagttatgtcatgttatcgatatgtgaatacatagcatatcagaaggcacacccggagaactgaaacatcttagtacccggaggaagagaaagaaaattcgattcccttagtagcggcgagcgaaacgggaagagcccaaaccaacaagcttgcttgttggggttgtaggacactctatacggagttacaaaggacgacattagacgaatcatctggaaagatgaatcaaagaaggtaataatcctgtagtcgaaaatgttgtctctcttgagtggatcctgagtacgacggagcacgtgaaattccgtcggaatctgggaggaccatctcctaaggctaaatactctctagtgaccgatagtgaaccagtaccgtgagggaaaggtgaaaagcaccccggaaggggagtgaaatagaacctgaaaccgtgtgcttacaagtagtcagagcccgttaatgggtgatggcgtgccttttgtagaatgaaccggcgagttacgatttgatgcaaggttaagcagtaaatgtggagccgtagcgaaagcgagtctgaatagggcgtttagtatttggtcgtagacccgaaaccaggtgatctacccttggtcaggttgaagttcaggtaacactgaatggaggaccgaaccgacttacgttgaaaagtgagcggatgaactgagggtagcggagaaattccaatcgaacctggagatagctggttctctccgaaatagctttagggctagcctcaagtgatgattattggaggtagagcactgtttggacgaggggcccctctcgggttaccgaattcagacaaactccgaatgccaattaatttaacttgggagtcagaacatgggtgataaggtccgtgttcgaaagggaaacagcccagaccaccagctaaggtcccaaaatatatgttaagtggaaaaggatgtggcgttgcccagacaactaggatgttggcttagaagcagccatcatttaaagagtgcgtaatagctcactagtcgagtgacactgcgccgaaaatgtaccggggctaaacatattaccgaagctgtggattgtcctttggacaatggtaggagagcgttctaagggcgttgaagcatgatcgtaaggacatgtggagcgcttagaagtgagaatgccggtgtgagtagcgaaagacgggtgagaatcccgtccaccgattgactaaggtttccagaggaaggctcgtccgctctgggttagtcgggtcctaagctgaggccgacaggcgtaggcgatggataacaggttgatattcctgtaccacctataatcgttttaatcgatggggggacgcagtaggataggcgaagcgtgcgattggattgcacgtctaagcagtaaggctgagtattaggcaaatccggtactcgttaaggctgagctgtgatggggagaagacattgtgtcttcgagtcgttgatttcacactgccgagaaaagcctctagatagaaaataggtgcccgtaccgcaaaccgacacaggtagtcaagatgagaattctaaggtgagcgagcgaactctcgttaaggaactcggcaaaatgaccccgtaacttcgggagaaggggtgctctttagggttaacgcccagaagagccgcagtgaataggcccaagcgactgtttatcaaaaacacaggtctctgctaaaccgtaaggtgatgtataggggctgacgcctgcccggtgctggaaggttaagaggagtggttagcttctgcgaagctacgaatcgaagccccagtaaacggcggccgtaactataacggtcctaaggtagcgaaattccttgtcgggtaagttccgacccgcacgaaaggcgtaacgatttgggcactgtctcaacgagagactcggtgaaatcatagtacctgtgaagatgcaggttacccgcgacaggacggaaagaccccgtggagctttactgtagcctgatattgaaattcggcacagcttgtacaggataggtaggagcctttgaaacgtgagcgctagcttacgtggaggcgctggtgggatactaccctagctgtgttggctttctaacccgcaccacttatcgtggtgggagacagtgtcaggcgggcagtttgactggggcggtcgcctcctaaaaggtaacggaggcgctcaaaggttccctcagaatggttggaaatcattcatagagtgtaaaggcataagggagcttgactgcgagacctacaagtcgagcagggtcgaaagacggacttagtgatccggtggttccgcatggaagggccatcgctcaacggataaaagctaccccggggataacaggcttatctcccccaagagttcacatcgacggggaggtttggcacctcgatgtcggctcatcgcatcctggggctgtagtcggtcccaagggttgggctgttcgcccattaaagcggtacgcgagctgggttcagaacgtcgtgagacagttcggtccctatccgtcgtgggcgtaggaaatttgagaggagctgtccttagtacgagaggaccgggatggacatacctctggtgtaccagttgtcgtgccaacggcatagctgggtagctatgtgtggacgggataagtgctgaaagcatctaagcatgaagcccccctcaagatgagatttcccaacttcggttataagatccctcaaagatgatgaggttaataggttcgaggtggaagcatggtgacatgtggagctgacgaatactaatcgatcgaagacttaatcaaaataaatgttttgcgaagcaaaatcacttttacttactatctagttttgaatgtataaattacattcatatgtctggtgactatagcaaggaggtcacacctgttcccatgccgaacacagaagttaagctccttagcgtcgatggtagtcgaacttacgttccgctagagtagaacgttgccaggcaaaaaatggatgcgatgagccgcattgagaccgcaaggtctctttttttatgtctaaaacgtcaaaataaaaagcaaacacaaagaaaaatggcttggcgaagtgaaaacgtttgaatctgacgaaacgagaaaagaacgcaacgagtttagtagagctaaatgagtaagtgagagccgtaggagaggaaagaagcaagcgattgtcacaagtcaagaaaggttcttagcgacgatggtagccaacttacgttccgctagagtagaacgttgccaggcaaaaatggatgcgatgagccgcattgagaccgtgaggtctctttttttatgtctaaaacgtcaaaataaaagttaacacaaagaaaatggcttgacgaagtgaaaacgtttgaatctgacgaaacgagaaaagagcgcaacgagtttagtagagctaaatgagtaagcgagagccgaagaaaatgataatttaataatgtacactttcgattgtctaagtatgtataactttaattttgtgtttatataaatttaaaatgatatcatcgaaaacaaaatattgtataaatagagaagagcagtaagacggtatctaattgaaaatgatcttactgctcttttatatactttattgaaatacaaaatggaaattaattattatacaatagacaagctattgcataagtaacactaacttttatcaaagaagtgttactttataattaatgattttattagagcgtctacatgcggttttaaagcatcatcgtctataccgccaaagcctaatataaatttaggggttttcttatagtcttgatcatcatcaaaattataaacttgtaattttaactttactttgtttgctctatcaagacactcttgtaatgttaatccattttttactgtaattgtaaaatgcatacccgtttcagcaccttgaatatcaagctgctctttgtaaggtttcaatctttttaaaatataggttagttttctacgataaattcgtctcattttatttaaatgcctttcaaaaccaccggaagatataaacgttgcaataaggttttgcatatgaacaggtacagtgttgccttcaatgtgattttgagaatgatattttttcattatagaatagggtaacaccatatatgcaactcgacagctaggaaaaatagactttgaaaatgtactgatataaatcactttttctcctcttgaatatagaccttgaattgctggaatgggtttgccgaaatatctaaactcggaatcataatcatcttctataataaatcgttcttctttttcttgagcccattgtattaattgagttcgcttttttaagtccatcacatatccagttggaaattgatgggaaggcgttatatatactatatttttttgtgatttaataacttcatctacgtttattccattatcttcaacttcaatttgttcatattcaacttgttttttatctaaaatatttttgattggtggataactaggtttttcgataataaatgttgaagtataaagtaaatcgactaattgatttactaattgttcggtagatgagccaattataatttgattaggatcacaaattacaccacgattagtaaataaataaaatgccagttgaaatcttaaatgtaattctccttgaaaatgtcctctacgtaattgatttaaatgatttgtatcataaagatctttggaatactttctgaaaagttctatagggaaatgtttcgtatctatttcatccaaattaaaagcataatcataagcttcatcactcgcttttggtttatatgaatcatcatcaaaaagagaggggataggttgattgtttaaaattgttaaagattcaatttcggacacaaaatatccagagcgaggtcttgaataaatgtaaccttcgtctaatagaagttgatatgcatgctctacggttgtttggctgatagataaatgtttgcttaattgtcttttagaataaaatttatcgccttctttaaattgaccttcaattatttgtttttttaatttttcataaagttgatggtataaagtgtttttcaattttataactgacctcctaaatttatcttattttgtacctttttaaatatcagtttatacattacaatgtatttaatcaacttgaaaaggggttttatgtataatgagtaaaattattggatcagacagagtcaaaagaggtatggctgaaatgcaaaaaggcggcgttattatggatgtcgttaatgctgagcaagcaagaattgcagaagaagcaggcgcggtagcagttatggcattagaacgagtaccttctgatattagagctgctggtggcgttgcacgtatggcaaaccctaaaattgtagaagaagtaatgaatgctgtttctattccagtcatggctaaagcacgtattggtcatatcactgaagcaagagtattagaggcgatgggtgttgactatattgatgaatcagaagtgttaacaccagcagatgaggaatatcacttaagaaaagatcaatttacagtaccatttgtatgtggatgtcgtaatttaggtgaagctgcgcgtagaattggtgaaggtgctgctatgttacgtactaaaggtgaaccaggtacaggtaatattgttgaagctgtaagacatatgagacaagttaattcagaagttagtcgattgactgtaatgaatgatgatgagattatgacttttgcgaaagatatcggtgcgccttatgaaattttaaaacaaattaaagacaatggtcgtttaccggtagttaactttgcagctggtggcgttgcgactcctcaagatgctgctttaatgatggaattaggtgccgacggtgtattcgttggatcaggtatttttaaatcagaagatccagaaaaatttgctaaagcaattgttcaagcaacaacacattaccaagactatgagctaattggaagattagcaagtgaacttggcactgctatgaaaggtttagatatcaatcaattatcattagaagaacgtatgcaagagcgtggttggtaagatatgaaaataggtgtattagcattacaaggtgcagtacgtgaacatattagacatattgaattaagtggtcatgaaggtattgcagttaaaaaagttgaacaattagaagaaatcgagggcttaatattacctggtggcgagtctacaacgttacgtcgattaatgaatttatatggatttaaagaggctttacaaaattcaactttacctatgtttggtacatgcgcaggattaatagttctagcgcaagatatagttggtgaagaaggataccttaacaagttgaatattactgtacaacgaaactcattcggtagacaagttgacagctttgaaacagaattagatattaaaggtatcgctacagatattgaaggtgtctttataagagcgccacatattgaaaaagtaggccaaggcgtagatatcctatgtaaggttaatgagaaaattgtagccgtccagcaaggtaaatatttaggcgtatcattccatcctgaattaacagatgactatagagtaactgattactttattaatcatattgtaaaaaaagcatagcttaatgtatgctaaatcaacgaattattgatatttatagatttgttgagaagacaatatctccttcaaacttagctttggaggagctatttttttatgtcaaaattaaaaatgataaaaaataaagatatacataaaaaaacccttcaaagagactgagaatagtcaaaattttgaaggggttaattcgatgttgatgtatttgttaaataaagaatccagcgattgcagctgaaatgaaagatactagtgttgcaccgaataatagtttcaaaccaaagcgggcaactgtatctccttttttgtcattaagtgatttaatcgcacctgaaataataccaatagagctaaagttagcaaatgatactaagaatacagatgtaacaccttttgcgtgttcagataaatcactaagtttaccaagtgcttgcattgctacaaattcgttagataatagttttgtcgccataactgaaccggcttgaactgcatcttgccatggcacaccgactaagaatgcaaatggtgcaaagacaaaaccaattaatgtttggaaatcccaagaaatagcgccacctgaaactgtactaaagatattgcttacaattccatttaatagagcgataatagcaatgtatccgattaacattgcgcctacaatgacagctactttaaatccatctaaaatatattctcctagcatttcgaagaatgattgttgtctttcttcagtttcttcaactaataatttgtcatcttcttcattaactttataagggttaataattgaagcgatgatgaaaccaccaaataagtttaagacaacagccgttacaacatatttaggttcaattaaggtaaagtatgcaccgataattgaagcagaaacagtcgacattgctgaagctgttaatgtgtataaacgttgcttaggtatgtatggtaattgttttttaattgaaataaatacttcagattgtcccaaaattgctgcagcaactgcattgtatgattctaaacgtcccataccattaattttagaaattaagaatcctaaaacattaatgattaaaggtaaaatctttgtgtattgaaggataccgataatcgctgaaataaatacgataggtaataatacactgaagaagaatggtggttgcttaggatcgatatattgaataccaccgaatacaaagttaacaccatctgctgcttttaataataagtagttaaaaccgtttgaaataccaccaataaccttgattcccattgtagttttaagcaagataaatgcaaagataagctgaattgcaagtaaaattcctacatatttccagcgaatatttttcctgtctgagctaaatagaaacgcaagtgctaaaaagaagataattccgataatcccaattagaatatgcatatatttctcattcctttagttttttctacaatctatcatacaataaaatggaagggctaacatcataaatttttgaaaatataaaaacaaattaattgaaaaaggtcaaaataggtcatataatatagtcaaagaaggtcaaaaaggggtgatatacatgcacaatatgtctgacatcatagaacaatacatcaaacgtttatttgaagagtcgaatgaagatgtcgttgaaattcagagagcgaatatcgcacagcgttttgattgtgtaccatcacaattaaattatgtaatcaaaacacgattcactaatgaacatggttatgaaatcgaaagtaaacgtggtggtggtggttacatccgaatcactaaaattgaaaataaagatgcaacaggttatattaatcatttgcttcagctgattggaccttctatttctcaacaacaagcttattatattattgatgggcttttagataaaatgttaataaatgaacgtgaagctaaaatgattcaagcagttattgatagagaaacgctatcaatggatatggtttctagagatattattagagcaaatattttaaaacgtttgttaccagttataaattattactaaatgaaatgaggtgttgaagtgctttgtgaaaattgtcaacttaatgaagcggaattaaaagttaaagttacaagtaaaaataaaacagaagaaaaaatggtgtgtcaaacttgtgctgaggggcaccatccgtggaatcaagctaatgaacaacctgaatatcaagaacatcaagataatttcgaagaagcatttgttgttaagcaaattttacaacatttagctacgaaacatggcattaattttcaagaagtagcgtttaaagaagaaaaacgttgcccatcatgtcatatgactttgaaagatattgcacatgttggtaaatttgggtgtgctaattgttatgcaacatttaaagatgacatcattgatatcgtccgcagagttcaaggtggacaatttgagcacgttggaaagacaccacattcttcacataaaaagatagctttaaagcgaaaaatcgaagaaaagaatgaatatttgaaaaaacttattgaaatccaagattttgaggaagcagccattgttagagatgaaattaaagcactaaaagctgagagtgaggtgcaacatgatgacgcataatattcatgataatatcagccaatggatgaaaagtaatgaagaaacaccaattgttatgtcttctagaattcggttagcgcgtaatttagaaaatcatgtgcatccactaatgtatgctactgaaaatgatggatttagagttataaatgaggtacaagatgccttgccaaattttgaattaatgcgtcttgatcaaatggatcaacaaagtaaaatgaaaatggttgcaaagcatttgattagtcctgaactaataaaacaaccagcagccgcagtattagtgaatgatgatgaatctttaagtgtcatgataaatgaagaggaccatattcgtattcaagctatgggaactgacacgacattacaggctttatataatcaagcttcatcaattgatgatgaattagatcgaagccttgatataagttatgatgaacaacttggttatttaactacatgtcctaccaatataggtactggtatgagagcaagcgtgatgctacatttaccaggtctatctattatgaaaagaatgacacggattgctcaaaccattaatcgttttggatatacaatcagaggtatttacggtgaaggttcgcaagtttatggacatacttatcaagtatccaaccaacttacacttggtaaatctgagttagaaatcatagaaacattaacagaagttgttaatcaaatcattcatgaagaaaaacaaatacgacaaaagttagacacttataatcaattagaaacacaagaccgtgtttttcgctcgctaggtattttacaaaactgtagaatgataactatggaagaggcttcttatagattaagcgaagttaaacttggtatagatttaaattacattgaattacaaaactttaaatttaatgaattgatggtagctatacagtcaccatttttattagatgaagaagatgacaaatctgtaaaagaaaaacgagcagatatactaagagaacatataaagtaggaggtcattatttatgttatttggtagattaactgagcgtgcacagcgcgtattagcacatgcacaagaagaagcaattcgtttaaatcattcaaatataggaacagaacacctattattgggattaatgaaagaacctgaaggaattgctgcaaaagtattagaaagttttaatatcactgaagataaagtaattgaagaagttgaaaaattaatcggacatggtcaagatcatgttggtacattgcattatacacctagagctaaaaaagttattgaattatcgatggatgaagctagaaaattacatcacaattttgttggaacggaacatattttattaggcttgattcgtgaaaatgaaggtgttgcagcaagagtttttgcaaatctagatttaaatattactaaagcacgtgcacaagttgtgaaagctttaggaaaccctgaaatgagtaataaaaatgcacaagctagtaagtcaaataatactccaactttagatagtttagctcgtgacttaacagtcattgccaaagacggtacattagatcctgttataggacgtgataaagaaattacacgtgtaattgaagtattaagtagacgtacgaaaaacaatcctgtacttattggagagccaggtgttggtaaaactgctattgctgaaggtttagcgcaagccatagtgaataatgaggtaccagagacattaaaagataagcgtgttatgtctttagatatgggaacagtagttgcaggtactaaatatcgtggtgaatttgaagagcgtctgaaaaaggttatggaagaaatccaacaagcaggtaatgtcatcctatttattgatgagttgcatactttagttggtgctggtggtgctgaaggtgctatcgatgcttcgaatattttgaaaccggcattagcacgtggtgaattacaatgtattggtgctactacattagatgaatatcgcaaaaatattgaaaaagacgcggctttagaacgtcgtttccaacctgtacaagttgatgaaccttcagtagtagatacagttgctattttaaaaggattaagagatcgttacgaagcacaccatcgtattaatatttcagacgaagctattgaagcagctgttaaattaagtaacagatacgtttcagatcgtttcttaccagataaagcaattgatttaattgatgaagcaagttctaaagtaagacttaagagtcatacgacacctaataatttaaaagaaattgaacaagaaattgaaaaagttaaaaatgaaaaagatgctgcagtacatgctcaagagtttgaaaatgctgctaacctgcgtgataaacaaacaaaacttgaaaagcaatatgaagaagctaaaaatgaatggaagaatgcacaaaatggcatgtcaacttcattgtcagaagaagatattgctgaagttattgcaggatggacaggtatcccattaactaaaatcaatgaaacagaatctgaaaaacttcttagtctagaagatacattacatgagagagttattgggcaaaaagatgctgttaattcaatcagtaaagcggttagacgtgcccgtgcagggttaaaagatcctaaacgaccaattggtagctttatcttccttggaccaactggtgttggtaaaactgaattagctagagctttagctgaatcaatgtttggcgatgatgatgcgatgatccgtgtagacatgagtgaatttatggaaaaacacgcagtgagccgattagttggtgctcctccaggatatgttggtcatgatgatggtggacaattaactgaaaaagttagacgtaaaccatattctgtaattttatttgatgaaattgaaaaagctcatccagatgtatttaatattctattacaagttttagatgatggacatttgacagatacaaaaggacgtacagttgatttcagaaatacaattatcataatgacatcaaacgttggggcacaagaattacaagatcaacgatttgctggattcggtggttcaagtgatggacaagattatgaaacaattcgaaaaacgatgttaaaagaattaaaaaattcattccgtccagaatttttaaaccgtgtagatgatatcattgtattccataaactaacaaaagaagaattaaaagaaattgtaacaatgatggttaataaattaacaaatcgattatctgaacaaaacataaatattattgttactgataaagcgaaagacaaaatcgcagaagaaggatatgatccagaatatggtgcaagaccattaattagagcgatacaaaaaactatcgaagataatttaagtgaattaatattagatggtaatcaaattgaaggtaagaaagttacagtagatcatgatggtaaagagtttaaatatgacattgctgaacaaacttcagaaactaaaacaccatcgcaagcataattataaaacagtccaaaacaaattaaagttttgggctgtttttttagtagcattgaactatagaaattcgtgaaagtatccatcaacgaaacaatctataaaacaatcatcaaaggatagttaagaattatatgtaacaagttaatgagcctacagcgatagcataaaggtatgaatttttataaaggttttttgtttgaagatactagcaacttacgtcaaaataaaataggtctatataatattgtgataaatctagagaaaagagtttactaagaaattattaagattttatctttgaaagataccgactatcaacatgatgtaagtttattttataatattcataaaaaataaatctggtaaaacagtttgcgttagtagtcatgttaaaatacaaacaaatgtaactcacatttaatttgtcataatgggaatgtgcgtttaaaatagatttgttcaaaggaaagtggaggtgcaattttggccaagaaaaaagtgatttttgaatgtatggcttgtggttatcaatctcctaaatggatggggaaatgtcctaattgtggcgcttggaatcaaatggaggaaattgttgaaaaagcagccaatcctaaacatggagttaaaaccaaggaattagcaggtaaagtacaaaaattaaatagtattaaacatgaaacaacgccgagagtgttaacagattcagcagaattcaaccgtgtattaggtggaggtattgtgagcggatcgttagtacttattggtggggatccaggtattggtaagtcaacgttacttttacaaatttgtgcatcgttatctcaaaagaaaaaagtactatatattactggagaagaatcgcttagtcagactaaattacgtgcagagcgattagatgaagattcaagtgaattgcaagtattagctgaaacagatcttgaagttatttatcaaacagtaaaagaagaacaacctgatttattagtagtggattcgattcaaacaatatatcatcctgaaatcagctctgcgccaggttctgtttcacaagttcgtgaaagtacacaaagtttaatgaatattgctaaacaaatgaacattgcaacttttatagtgggtcatgtaacgaaagaaggtcaaattgctggcccaagattgctagaacacatggttgatactgtgctttattttgaaggcgatgaacaccacgcatatcgaattttgcgagctgttaaaaaccgttttggttcaacgaatgaaatgggaatcttcgaaatgaagcaaagtggattaaaaggtgtaaataatccatctgaaatgtttttagaagaacgttcaacaaatgttccaggttcaacaattgttgcaaccatggagggaaccagaccacttttaatagaagttcaagcgctggtaactccaacgacttttaacaatccgagacgaatggcaacagggattgatcataatcgattaagtttgttgatggctgttttggaaaagaaagaaaattatctattacaacaacaagatgcttatatcaaagtagctggcggtgtaaagttaacggagccagcagttgatttaagtgtaattgtagcaactgcatctagctttaaagataaagctgtcgacggattagattgctatattggagaagttggtttaacgggtgaggtacgtcgtgtatctcggatagaacaacgcgtgcaagaggctgcaaaactaggtttcaaacgtgtaattattcctaaaaataatataggcggatggacatatcctgaaggtatacaagtaataggtgtaactactgtacatgaagcattgtcatttgctcttcattcataaaacatcaagaaaggaggacattgtgtgaatatcgttaaactaatggttattattatttacttaattattgggagcgcattaggaataattattattcctgaaattgcaaatgatcttggattacaaaactccagctttttaaaaaatcactatgtagatggcattatcggtagtatttttatgttcttaatttttggtgtatttattagacgagttactaacgctataaaaggtttagaacattttattatgcgtagaagtgctgttgaaatactattcgcaacaataggtttaataatcggattacttatttctgttatggtgtcgtttatattagaatcaattggtaactctatttttaatcatttcattcctgtcataattacgatattactatgttatttcggtttccaatttggccttaaaaaacgagatgaaatgttaatgtttttacctgagaatatagcgcgttccatgtcacaacatactaaaagtgctacgccaaaaattatcgacacaagcgcaattattgatggtcgtattttagaagtcattcgttgcggttttatcgatggcaatattttaattccacaaggtgttattaatgaattacaaattgttgcagattcaaatgacagtgttaaacgtgaaaagggtaaaagaggcttagatattttaaatgaattgtatgatttagactatcctacaaaggttatacatccaactaaaacacatagtgatattgatacgatgttattaaaactagcaaaacaatatcatgcaagtattataacgacagatttcaacctaaataaagtttgtcatgtacatggtattaaagcattaaatgttaatgatttatcagaagcaatcaaacctaatgtacatcaaggtgatcaactgcatattttactgacaaaaatgggtaaggagcctggtcaggcagtaggatatctagatgatggtacgatggtggttgttgataatgctaaaaatcttattggcagtcatgtcaatttagaagtagtcagcttattgcaaacatcttcaggaagaattgtttttgctaaaaaaatcgaagatacagtatcattataaaaactgtagttgacgaaaacaaaatagatattaaaaggtatatgaaatggcgaagtttgtaatttgaagtataactataaataaatgcaaaacatatcagttatcaaaaaatgcaaatagtgctaatatatcattgaaacaagttcattaagtgttaaattttagatattaataaagttattcttatagcaatcaagacatacaaaattagaatcaattttaacgtatttgaatagttaatttgaagtttaatttcacagtacataatattcatttttaagtcgttgaaatgtttatgtagtgcagtcttgattcttagggatagcttttttaaagtgttgaaaaaacaactgctttctatttaaaatttaagcatattacccagggaattatgttatgattaaacaatgaaattattttaaggtcatgttaaaaagcattgtttcgttttaacaataagacgagttagacatttgttatgacggtcgaagatagcaaatgaacaatttatatgaactaacttgaaaatctgatatttaatttaggagtgaaaaaaatgagcgatcgtataagagtaagatatgcaccaagtccaactggttatcttcatattggtaatgcaagaacagcattattcaattacttgtatgctaaacattacaacggagattttgtgattcgaattgaagatactgataaaaaacgtaatttagaagatggagaaacatcacaatttgataatcttaaatggttaggattagattgggatgagtctgtagataaagacaatggctacggaccatatcgtcaatctgaacgtcaacatatctaccaaccattaatagatcagttactagcagaagataaagcatataaatgctatatgacagaagaagaattagaagctgaacgtgaagcacaaatcgctcgtggtgaaatgcctcgctatggtggacaacatgcgcatttgactgaagaacaacgtcaacaatttgaagcagaaggacgccaaccatcaattcgtttccgagtacctcaaaaccaaacgtattcatttgatgatatggtaaaaggaaatatttcatttgattcaaatggtattggtgactgggttatcgtaaaaaaagatggcattccaacgtacaattttgcagtagctatagatgatcattacatgcaaatttcagatgtaattcgtggtgatgatcatatttcaaacacgcctaaacaaattatgatttatgaagcatttggctgggagccacctcgttttggtcatatgtcattaattgttaatgaagaacgtaaaaagttaagtaaacgtgatgggcaaattttacaatttattgagcaatatcgtgacttaggttatttacctgaagcgttatttaattttattgcgttattaggttggtctcctgaaggtgaagaagaaatcttttctaaagaagaatttatcaaaatctttgatgaaaagcgtttgtcaaaatcaccagcatttttcgataagcaaaaattagcatgggttaataaccaatatatgaaacaaaaagatactgaaacagtattccaattagcattacctcatttaattaaagcaaatttgattcctgaggtgccgtcagaagaggatttatcttggggacgcaaattaattgcgctttatcaaaaagaaatgagttatgccggtgaaattgtacctttatcagaaatgttctttaaagaaatgccagctcttggtgaagaagaacaacaagtgattaatggagagcaagtaccagagttaatgacgcacttattcagtaaattagaagcacttgaaccatttgaagcggctgaaattaaaaagacaattaaagaagttcaaaaagaaacaggaataaaaggcaagcaattatttatgcctattcgtgttgctgtaacaggccaaatgcatggtcctgaattaccaaatacaattgaagtacttggtaaagaaaaagtgctaaaccgtttaaaacaatataagtaatgaaatagacaagatcaaggtagtatatacttgaattttataacgtaaccacatatgataaagttgtattaacaaattacaacaatatgaataaagtattttatataaaacgaaggattagtaattaaatttatacgatgcagagagtgtacggttgctgtgagtacaacgtagaaattaatgaatgcaccttcgtaaaatgaattaaatatataatgagagtgatgagcattaagttgacttagtttccttgataatttggaagcgcccgcaatattattaatgttattcgctaaattcagagtggaaccgtgcggaagcgcctctaacaatacaatttgtatgttagtggtgcttttttgatatttaatttcgcaggtacttcaattatgtatttacgtagttcaatcattgaggaggaaatgatcttgttaaaaagaatgagagacgatataaaaatggtatttgagcaggatccagcggcacgttcaacattagaagtcattacaacgtatgcaggtttacatgcagtttggagtcatttgattgcacataagttatacaaccaaaaaaaatatgttgcagcacgcgcgatatctcaaatttcaagatttttcacaggtatagaaatccatccaggtgctaaaattggaaagcgtctatttatagatcatggtatgggcgttgtaataggagaaacatgtacaattggtgataatgtgacaatctatcaaggcgtgacacttggtgggacagggaaagaaagagggaaaagacacccagatataggagacaatgttttaatagcagccggtgcgaaagttttaggaaatattaaaataaattcaaatgtaaatattggtgcaaattcagttgttttacaatcagttccaagttattcaacggttgttggtataccaggacatattgttaagcaagatggtgttcgagttggaaaaacatttgatcatcgccatctacctgatccaatttatgaacaaattaagcatttagaacgacaacttgaaaagactaggaatggagagattcaagatgattacattatataatacgcttacacgtcaaaaagaagtgttcaagcctatagaaccagggaaagtaaaaatgtatgtatgtggtcctactgtatataactacattcatattggtaacgcaagaccagcaattaattatgacgtagtgagacgttactttgaataccaaggatataatgtagaatatgtatcaaattttacagacgtagatgataaattaattaaacgttctcaagaattaaatcagtctgttcccgaaattgcagaaaaatatatcgctgcttttcatgaagatgttggtgcgttaaatgttagaaaagcgacttcaaatccaagggtaatggaccatatggatgacattattcaatttattaaagatttggtggatcgaggttatgcatatgaaagtggtggcgatgtttactttagaacacgtaaatttgaaggttatggtaaattaagtcatcaatccatagatgacttaaaagtgggtgctcgtatagatgcaggagagcataaagaagatgcacttgattttacattgtggaaaaaagcgaagcctggcgagattagttgggatagcccatttggtgaaggtagaccaggatggcatatagaatgttctgtaatggcatttcatgagctaggacctacaattgatatacatgcgggtggttcagatttacaatttccacatcatgaaaatgaaatagcacaatcagaagcacataatcatgcgccatttgctaattattggatgcataatggtttcattaatattgataatgaaaaaatgagtaaatcactaggcaactttattttagttcacgatattattaaagaagttgatccagatgtactaagattctttatgattagcgtacattatagaagcccaattaactataatctagaattggtagaatcagcacgtagtggactagagcgtattcgcaatagttatcaattaattgaagagcgcgcacaaattgctactaatattgaaaatcaacagacatatattgatcaaattgatgcgattttaaatcgttttgaaacagttatgaatgatgattttaatacagctaatgcaattacagcttggtatgatttagcaaaacttgcgaataaatatgtactagagaacacaacatcaacagaagtaattgataaatttaaagcagtttatcaaattttcagcgatgttttaggtgtaccgttaaaatctaaaaatgcagatgaattattggatgaagatgttgaaaaattaatcgaagagcgtaatgaagcaaggaaaaacaaagattttgcacgagcagatgaaattcgagacatgctgaaatcacaaaacattatattagaagacacacctcaaggggttagatttaaacgtggataatcaacaagataatcacattaaattattgaatccattgaccttagcatatatgggagacgcagtcttagatcaatatgtacgtacctatatcgttttaaagcttaaaagtaagcctaataaactacatcaaatgtctaaaaaatatgtatctgccaaaagtcaggcgcaaacgttagaatatttaatggagcaagaatggtttacagacgaagaaatggatattttgaagcgagggcgtaacgcgaaaagtcatactaaagctaaaaacactgatgttcaaacatatcgtaaaagttcagcgatagaagcagtgataggttttctttatttagaaaaaagagaagaacgattagaggcattattaaataaaataataacaatagtaaacgaaaggtagtgacgatgtggaagatacggttattgttggtaggcatgctgttagagaagcgattattactgggcatccgataaataagatattgattcaagaaggtattaaaaagcaacaaattaatgaaattttaaaaaatgcaaaagatcaaaaaatcattgttcaaactgtaccaaaatctaaattagattttttagcaaatgcaccacatcagggtgttgcagcgcttattgcaccatatgaatatgctgacttcgatcaatttttaaaacagcaaaaagaaaaagaaggtttatcgacagtacttatattagacggcttagaagacccgcataacttgggatcaattttaagaacagccgatgcaacgggagttgatggtgttattattcctaaacgtcgttcagttacactaacgcaaacagttgcaaaagcctcaacaggtgcaattgaacatgtaccagttattcgagtgacaaatttagctaaaactatcgatgaactaaaagataatggcttttgggtagctggcactgaagctaataatgcaacagattatagaaatctagaagcggacatgtcattggctattgtaattggtagcgaaggacagggtatgagtcgcctagtaagtgataaatgcgatttttatattaagattccaatggttggacatgtaaacagtttgaatgcttcggttgcagcaagtttaatgatgtacgaagtatttcgaaaaagacatgatgttggagaaatataatgaaagaacgttacttaatcattgatggatacaatatgataggacaatcaccaacgctaagcgccattgcaaaagagaatttagaagaagctagaatgcaattaatagatgcaattgcaaattataatgcagttatttcagatgaaattatttgtgttttcgatgcttatgaccaatcgggtgttgaaagagaatacatgtatcatggcgttaaaacgatttttaccaaggaaaaagaaacagctgatagtttcatagaacgttatgtttatgaactttatgacaagcatactaagcatattacagttgtaacaagtgatatgagtgagcaacatgctatctttggatcaggtgcatatagaatatcatctcgcgaaatgtggagagatttaaaagaaaatgaaattgatgtgagtaaatcattagatgatataagtgaaaacaagccaagaactcgaattccgttatcttctgaaatccttgcagaatttgaaaaaatacgaagaggacatcataagaaatgacatttccgtcatcttgaaattttgaatgtaacaatattaaactaaccttaaattttagatagaaggggttagtttaatatttgaaatacgatttgacaactcaagacagtacaatcaaacgtaacaatgcaataaatgataaagacttcgaaaagttagtaatggatctacaaccattaattattcgacgcatcaaaacatttggatttaatcattatgatttagaagacttatatcaagaaatacttatacggatgtataggtcggtccaaacatttgattttagtggagagcagcctttcacaaattatgttcaatgtttaattacgtctgtaaagtatgattatttgagaaaatatttagctacaaataaaagaatggataatttgattaatgaatatagagttacgtatccatgtgcaataaagcgttatgatgttgaaaacaattatttgaataaattagcaattaaagagttgattcgtcagtttaagtatttgagtgtatttgaaaaagatgtcatgtatttaatgtgtgaacaatataagccgagagaaattgctcaactgatgcatgtaaaagagaaagtgatttataatgccatacaacgatgtaaaaataaaataaaacgttatttcaaaatgatttgaaaagcgccttaggacgtgaattgaattagaacgtgttacttactgatggtttgacatttgttataaattttatgtatagtatactggtattataatgaataaaggtgaattattgtgagaaaaatacctttaaattgtgaagcttgtggcaatagaaattataatgttcctaagcaagaaggctcggcaacaagattaaccttaaagaaatattgtccaaaatgtaacgcgcacacaattcataaagaatcgaaataaatacattcgaaataatactttgataatatgttcaaaggatttggaggttgagcagatggctaaaaaagaaagtttctttaaaggcgttaagtctgaaatggaaaaaacaagttggccgacgaaagaagagctatttaaatatactgtaattgtagtttctactgttatattcttcttagtctttttctatgccttagatttaggaattacagcattgaaaaatttattatttggttagaggagtgaagacatgtctgaagaagttggcgcaaagcgttggtatgcagtgcatacatattctggatatgaaaataaagttaaaaagaatttagaaaaaagagtagaatctatgaatatgactgaacaaatctttagagtagtcataccggaagaagaagaaactcaagtaaaagatggcaaagctaaaacgactgttaaaaaaacattccctggatatgttttagtggaattaatcatgacagatgaatcatggtatgtggtaagaaatacaccaggtgttactggttttgtaggttctgcaggtgcagggtctaagccaaatccattgttaccagaagaagttcgcttcatcttaaaacaaatgggtcttaaagaaaagactatcgatgttgaactcgaagttggcgagcaagttcgtattaaatcaggtccatttgcgaatcaagttggtgaagttcaagaaattgaaacagataagtttaagctaacagtattagtagatatgtttggccgagaaacaccagtagaagttgaattcgatcaaatagaaaagctttaattaacaattaaagttattaaactaaccaaaagataaaaaagagtattgattttttaattagaaaagtgttaaaattatgtggtcgcgcttttagagcgcccatttcgtcacgaaatgttaagagtgggagggcaaaactgagccctgtgaccacatcacgatatcaaggaggtgcacatcgtggctaaaaaagtagataaagttgttaaattacaaattcctgcaggtaaagcgaatccagcaccaccagttggtccagcattaggtcaagcaggtgtgaacatcatgggattctgtaaagagttcaatgcacgtactcaagatcaagcaggtttaattattccggtagaaatcagtgtttatgaagatcgttcatttacatttattacaaaaactccaccggctccagtattacttaaaaaagcagctggtattgaaaaaggttcaggcgaaccaaacaaaactaaagttgctacagtaactaaagatcaagtacgcgaaattgctaacagcaaaatgcaagacttaaacgctgctgacgaagaagcagctatgcgtattatcgaaggtactgcacgtagtatgggtatcgttgtagaataattttacgaatattaaatttgattacatgatttaaacgatgaagcagataacagagataataatgatgaattataaatataatctgaatgactagattaatgattgatttattcataagattaattcttctgttgtctgctcttaacttgcatatagcaagtaatgtgggaggaaattccgctaaaaccactaaaggaggaactataaatggctaaaaaaggtaaaaagtatcaagaagcagctagtaaagttgaccgtactcagcactacagtgttgaagaagcaattaaattagctaaagaaacaagcattgctaactttgacgcttctgttgaagttgcattccgtttaggaattgatacacgtaaaaatgaccaacaaatccgtggtgcagttgtattaccaaacggaactggtaaatcacaaagtgtattagtattcgctaaaggtgacaaaattgctgaagctgaagcagcaggtgctgactatgtaggtgaagcagaatacgttcaaaaaatccaacaaggttggttcgacttcgatgtagtagttgctacaccagacatgatgggtgaagttggtaaattaggtcgtgtattaggaccaaaaggtttaatgccaaaccctaaaactggaactgtaacaatggatgttaaaaaagctgttgaagaaatcaaagctggtaaagtagaatatcgtgctgaaaaagctggtatcgtacatgcatcaattggtaaagtttcatttactgatgaacaattaattgaaaacttcaatactttacaagatgtattagctaaagctaaaccatcatctgctaaaggtacatacttcaaatctgttgctgtaactacaacaatgggtcctggagttaaaattgatactgcaagtttcaaataataaataatataaacaattacaggctgaaagaaatatctttcagtctgtaaaaatatattgacaataagtaatttccaagttatattacttattgtgattattttacctaagacagtaggagttatttataacttaaaatttatcctgccgaggctaaaattgacttgaacgtgatgatctatgatctttcaagcactttttgccgtgggtagaaagtgctttttttattaattttaaaaaaagcaccaaaaatttaaatggaggtgtctgaatgtctgctatcattgaagctaaaaaacaactagttgatgaaattgctgaggtactatcaaattcagtttcaacagtaatcgttgactaccgtggattaacagtagctgaagttactgacttacgttcacaattacgtgaagctggtgttgagtataaagtatacaaaaacactatggtacgtcgtgcagctgaaaaagctggtatcgaaggcttagatgaattcttaacaggtcctactgctattgcaacttcaagtgaagatgctgtagctgcagcgaaagtaatttctggatttgctaaagatcatgaagcattagaaattaaatcaggcgttatggaaggcaatgttattacagcagaagaagttaaaactgttggttcattaccttcacacgatggtcttgtatctatgcttttatcagtattacaagctcctgtacgcaacttcgcttatgcggttaaagctattggagaacaaaaagaagaaagcgctgaataatttttagcgtaaaaaaattaaaaataatggaggaattataaaatggctaatcatgaacaaatcattgaagcgattaaagaaatgtcagtattagaattaaacgacttagtaaaagcaattgaagaagaatttggtgtaactgcagctgctccagtagcagtagcaggtgcagctggtggcgctgacgctgcagcagaaaaaactgaatttgacgttgagttaacttcagctggttcatctaaaatcaaagttgttaaagctgttaaagaagcaactggtttaggattaaaagatgctaaagaattagtagacggagctcctaaagtaatcaaagaagctttacctaaagaagaagctgaaaaacttaaagaacaattagaagaagttggagctactgtagaattaaaataattcaagtatcttaaacttaataatcaaagttttatagcaagtattgctataatataatgattctttgagaagttaaaaccccgttattttgataacggggttttattcatttaaagactgagtgaaatgttataattataatgacgagttacaaagtgaagatgaggtggaataatgagtcattattacgatgaagatccaagtgtaattagcaatgaacaacgtattcaatatcaattaaaccatcataaaattgatttaataactgataatggagtgttttcgaaagataaagtagattatggttcagatgttcttgttcaaacttttttaaaagcgcatccacctggtccaagtaagcgaattgccgatgttggttgtggttacggaccaattggtttgatgattgctaaagtatcaccacatcattcaattacaatgctagatgttaatcacagagcgctagccttagttgaaaaaaacaaaaaaataaatggtattgataatgcgatcgtaaaggaaagtgatgctttgtctgctgtggaagacaaaagttttgattttattttaaccaatccaccaataagagcagggaaagaaaccgtgcatcgtatattcgagcaagcattacatagattagactcgaacggtgaactattcgttgtaattcagaagaagcaaggtatgccatctgcaaagaaaagaatgaatgaactttttggaaatgtagaagtggtaaataaagataaaggatattacattctgagaagtataaaagcttgaaatgaaatggatattctgttatagttatataatgtaaaaatttatgttcaataagtgtgtacttttacgttaaatagataagttaattaagaataaatatagaatcgaaaatggtgtcatcattagtgttgccgttttctttttgtctttttattaatatgcttatggtatttagctaaaagcggatcacataatttttgaggggtgaatctgtttggcaggtcaagttgtccaatatggaagacatcgtaaacgtagaaactacgcgagaatttcagaagtattagaattaccaaacttaatagaaattcaaactaaatcttacgagtggttcctaagagaaggtttaatcgaaatgtttagagacatttctccaattgaagattttactggtaatttgtcattagagtttgtggattaccgtttaggagaaccaaaatatgatttagaagaatctaaaaaccgtgacgctacttatgctgcacctcttcgtgtaaaagtgcgtctaatcattaaagaaacaggagaagttaaagaacaagaagtctttatgggtgatttcccattaatgactgatacaggtacgttcgttatcaatggtgcagaacgtgtaatcgtatctcaattagttcgttcaccatccgtttatttcaatgaaaaaatcgacaaaaatggtcgtgaaaactatgatgcaacaattattccaaaccgtggtgcatggttagaatatgaaacagatgctaaagatgttgtatacgtacgtattgatagaacacgtaaactaccattaacagtattgttacgtgcattaggtttctcaagcgaccaagaaattgttgaccttttaggtgacaatgaatatttacgtaatactttagagaaagacggcactgaaaacactgaacaagcgttattagaaatctatgaacgtttacgtccaggtgaaccaccaactgttgaaaatgctaaaagtctattgtattcacgtttctttgatccaaaacgctatgacttagcaagcgtgggtcgttataaaacaaacaaaaaattacatttaaaacatcgtttatttaatcaaaaattagctgagccaattgtaaatactgaaactggtgaaattgtagttgaagaaggtacagtgcttgatcgtcgtaaaatcgacgaaatcatggatgtacttgaatcaaatgcaaacagcgaagtgtttgaattgcatggtagcgttatagacgagccagtagaaattcaatcaattaaagtatatgttcctaacgatgatgaaggtcgtacgacaactgtaattggtaatgctttccctgactcagaagttaaatgcattacaccagcagatatcattgcttcaatgagttacttctttaacttattaagcggtattggatatacagatgatattgaccatttaggtaaccgtcgtttacgttctgtaggtgaattactacaaaaccaattccgtatcggtttatcaagaatggaaagagttgtacgtgaaagaatgtcaattcaagatactgagtctatcacacctcaacaattaattaatattcgacctgttattgcatctattaaagaattctttggtagctctcaattatcacaattcatggaccaagcaaatccattagctgagttaacgcataaacgtcgtctatcagcattaggacctggtggtttaacacgtgaacgtgctcaaatggaagtacgtgacgttcactactctcactatggccgtatgtgtccaattgaaacacctgagggaccaaacattggattgattaactcattatcaagttatgcacgtgtaaatgaattcggctttattgaaacaccatatcgtaaagttgatttagatacacatgctatcactgatcaaattgactatttaacagctgacgaagaagatagctatgttgtagcacaagcaaactctaaattagatgaaaatggtcgtttcatggatgatgaagttgtatgtcgtttccgtggtaacaacacagttatggctaaagaaaaaatggattatatggatgtatcgccgaagcaagttgtttcagcagcgacagcatgtattccattcttagaaaatgatgactcaaaccgtgcattgatgggtgcgaacatgcaacgtcaagcagtgcctttgatgaatccagaagcaccatttgttggtacaggtatggaacacgttgcagcacgtgattctggtgcagctattacagctaagcacagaggtcgtgttgaacatgttgaatctaatgaaattcttgtacgtcgtctagttgaagagaacggcgttgagcatgaaggtgaattagatcgctatccattagctaaatttaaacgttcaaactcaggtacatgttacaaccaacgtccaatcgttgcagttggagatgttgttgagtataacgagattttagcagatggaccatctatggaattaggagaaatggcattaggtagaaacgtagtagttggtttcatgacttgggacggttacaactatgaggatgccgttatcatgagtgaaagacttgtgaaagatgacgtgtatacttctattcatattgaagagtatgaatcagaagcacgtgatactaagttaggacctgaagaaatcacaagagatattcctaatgtttctgaaagtgcacttaagaacttagacgatcgtggtatcgtttatattggtgcagaagtaaaagatggagatattttagttggtaaagtaacgcctaaaggtgtaactgagttaactgccgaagaaagattgttacatgcaatctttggtgaaaaagcacgtgaagttagagatacttcattacgtgtacctcacggcgctggcggtatcgttcttgatgtaaaagtattcaatcgcgaagaaggcgacgatacattatcacctggtgtaaaccaattagtacgtgtatacatcgttcaaaaacgtaaaattcatgttggtgataagatgtgtggtcgacatggtaacaaaggtgtcatttctaagattgttcctgaagaagatatgccttacttaccagacggacgtccgatcgatatcatgttaaaccctcttggtgtaccatctcgtatgaacatcggacaagtattagagctacacttaggtatggctgctaaaaatcttggtattcacgttgcatcaccagtatttgacggcgcaaacgatgacgatgtatggtcaacaattgaagaagctggtatggctcgtgatggtaaaactgtactttatgatggacgtacaggtgaaccattcgataaccgtatttcagtaggtgtaatgtacatgttgaaacttgcgcacatggttgatgataaattacatgcgcgttcaacaggaccatattcacttgttacacaacaaccacttggaggtaaagcgcaattcggtggacaacgtttcggtgagatggaggtatgggcacttgaagcatatggtgctgcatacacattacaagaaatcttaacttacaaatccgatgatacagtaggacgtgtgaaaacatacgaggctattgttaaaggtgaaaacatctctagaccaagtgttccagaatcattccgagtattgatgaaagaattacaaagtttaggtttagatgtaaaagttatggatgagcaagataatgaaatcgaaatgacagacgttgatgacgatgatgttgtagaacgtaaagtagatttacaacaaaatgatgctcctgaaacacaaaaagaagttactgattaatacgcaatttacaaaacaggcaaaaagatactaagctgaattttattgatgattcagtttagtactttaagccattttaaataaatgcaaatcaatcaaatagcacagctaatctaaattgaaggaggtaggctccttgattgatgtaaataatttccattatatgaaaataggattggcttcacctgaaaaaatccgttcttggtcttttggtgaagttaaaaaacctgaaacaatcaactaccgtacattaaaacctgaaaaagatggtctattctgtgaaaggattttcggacctacaaaagactgggaatgtagttgtggtaaatacaaacgtgttcgctacaaaggcatggtctgtgacagatgtggagttgaagtaactaaatctaaagtacgtcgtgaaagaatgggtcacattgaacttgctgctccagtttctcacatttggtatttcaaaggtataccaagccgtatgggattattacttgacatgtcaccaagagcattagaagaagttatttactttgcttcttatgttgttgtagatccaggtccaactggtttagaaaagaaaactttattatctgaagctgaattcagagattattatgataaatacccaggtcaattcgttgcaaaaatgggtgcagaaggtattaaagatttacttgaagagattgatcttgacgaagaacttaaattgttacgcgatgagttggaatcagctactggtcaaagacttactcgtgcaattaaacgtttagaagttgttgaatcattccgtaattcaggtaacaaaccttcatggatgattttagatgtacttccaatcatcccaccagaaattcgtccaatggttcaattagatggtggacgatttgcaacaagtgacttaaacgatttataccgtcgtgtaattaatcgaaataatcgtttgaaacgtttattagatttaggtgcacctggtatcatcgttcaaaacgaaaaacgtatgttacaagaagccgttgacgctttaattgataatggtcgtcgtggtcgtccagttactggcccaggtaaccgtccattaaaatctttatctcatatgttaaaaggtaaacaaggtcgtttccgtcaaaacttacttggtaaacgtgttgactattcaggacgttcagttattgcagtaggtccaagcttgaaaatgtaccaatgtggtttgccaaaagaaatggcacttgaactatttaaaccattcgtaatgaaagaattagttcaacgtgaaattgcaactaacattaaaaatgcgaagagtaaaatcgaacgcatggatgatgaagtttgggacgtattggaagaagtaattagagaacatcctgtattacttaaccgtgcaccaacacttcatagacttggtattcaagcatttgaaccaactttagttgaaggtcgtgcgattcgtctacatccacttgtaacaacagcttataacgctgactttgacggtgaccaaatggcggttcacgttcctttatcaaaagaggcacaagctgaagcaagaatgttgatgttagcagcacaaaacatcttgaaccctaaagatggtaaacctgtagttacaccatcacaagatatggtacttggtaactattaccttactttagaaagaaaagatgcagtaaatacaggcgcaatctttaataatacaaatgaagtattaaaagcatatgcaaatggctttgtacatttacacactagaattggtgtacatgcaagttcgttcaataatccaacatttactgaagaacaaaacaaaaagattcttgctacgtcagtaggtaaaattatattcaatgaaatcattccagattcatttgcttatattaatgaacctacgcaagaaaacttagaaagaaagacaccaaacagatatttcatcgatcctacaactttaggtgaaggtggattaaaagaatactttgaaaatgaagaattaattgaacctttcaacaaaaaattcttaggtaatattattgcagaagtattcaacagatttagcatcactgatacatcaatgatgttagaccgtatgaaagacttaggattcaaattctcatctaaagctggtattacagtaggtgttgctgatatcgtagtattacctgataagcaacaaatacttgatgagcatgaaaaattagtcgacagaattacaaaacaattcaaccgtggtttaatcactgaagaagaaagatataatgcagttgttgaaatttggacagatgcaaaagatcaaattcaaggtgaattgatgcaatcacttgataaaactaacccaatcttcatgatgagtgattcaggtgcccgtggtaacgcatctaactttacacagttagcaggtatgcgtggattgatggccgcaccatctggtaagattatcgaattaccaatcacatcttcattccgtgaaggtttaacagtacttgaatacttcatctcaactcacggtgcacgtaaaggtcttgccgatacagcacttaaaacagctgactcaggatatcttactcgtcgtcttgttgacgtggcacaagatgttattgttcgtgaagaagactgtggtactgatagaggtttattagtttctgatattaaagaaggtacagaaatgattgaaccatttatcgaacgtattgaaggtcgttattctaaagaaacaattcgtcatcctgaaactgatgaaataatcattcgtcctgatgaattaattacacctgaaattgctaagaaaattacagatgctggtattgaacaaatgtatattcgctcagcatttacttgtaacgcacgacatggtgtttgtgaaaaatgttacggtaaaaaccttgctactggtgaaaaagttgaagttggtgaagcagttggtacaattgcagcccaatctatcggtgaaccaggtacacagcttacaatgcgtacattccatacaggtggggtagcaggtagcgatatcacacaaggtcttcctcgtattcaagagattttcgaagcacgtaaccctaaaggtcaagcggtaattacggaaatcgaaggtgtcgtagaagatattaaattagcaaaagatagacaacaagaaattgttgttaaaggtgctaatgaaacaagatcataccttgcttcaggtacttcaagaattattgtagaaatcggtcaaccagttcaacgtggtgaagtattaactgaaggttctattgaacctaagaattacttatctgttgctggattaaacgcgactgaaagctacttattaaaagaagtacaaaaagtttaccgtatgcaaggtgtagaaatcgacgataaacacgttgaggttatggttcgacaaatgttacgtaaagttagaattatcgaagcaggtgatacgaagttattaccaggttcattagttgatattcataactttacagatgcaaatagagaagcatttaaacaccgtaagcgtcctgcaacagctaaaccagtattacttggtattactaaagcatcacttgaaacagaaagtttcttatctgcagcatcattccaagaaacaacaagagttcttacagatgcagcaattaaaggtaagcgtgatgacttattaggtcttaaagaaaacgtaattattggtaagttaattccagctggtactggtatgagacgttatagcgacgtaaaatacgaaaaaacagctaaaccagttgcagaagttgaatctcaaactgaagtaacggaataacaagtatataacagaggctaatgctttagcctcttgttatttttatgtaaattatttgatttaatgttgacgaattctcttgttcaatgttaatatattaaaggttgatgcaagcagaactttggaggataaattattgtctaaggaaaaagttgcacgctttaacaaacaacattttgtagttggtcttaaagaaacgcttaaagcgttaaagaaagatcaagttacatctttgattattgctgaagacgttgaagtatatttaatgactcgcgtgttaagccaaatcaatcagaaaaatatacctgtatcttttttcaaaagcaaacatgctttgggtaaacatgtaggtattaacgtcaatgcgacaatagtagcattgattaaatgagaattagtaagtgttttacttactaaattttatttaacctaaaaatgaaccacctggatgtgtgggattaaaaagtgaagagaggaggacatatcacatgccaactattaaccaattagtacgtaaaccaagacaaagcaaaatcaaaaaatcagattctccagctttaaataaaggtttcaacagtaaaaagaaaaaatttactgacttaaactcaccacaaaaacgtggtgtatgtactcgtgtaggtacaatgacacctaaaaaacctaactcagcgttacgtaaatatgcacgtgtgcgtttatcaaacaacatcgaaattaacgcatacatccctggtatcggccataacttacaagaacacagtgttgtacttgtacgtggtggacgtgtaaaagacttaccaggtgtgcgttaccatattgtacgtggagcacttgatacttcaggtgttgacggacgtagacaaggtcgttcattatacggaactaagaaacctaaaaactaagaatttagtttttaattaaatcttaaacttaaaatatttaatataaggaagggaggatttacattatgcctcgtaaaggatcagtacctaaaagagacgtattaccagatccaattcataactctaagttagtaactaaattaattaacaaaattatgttagatggtaaacgtggaacagcacaaagaattctttattcagcattcgacctagttgaacaacgcagtggtcgtgatgcattagaagtattcgaagaagcaatcaacaacattatgccagtattagaagttaaagctcgtcgtgtaggtggttctaactatcaagtaccagtagaagttcgtccagagcgtcgtactactttaggtttacgttggttagttaactatgcacgtcttcgtggtgaaaaaacgatggaagatcgtttagctaacgaaattttagatgcagcaaataatacaggtggtgccgttaagaaacgtgaggacactcacaaaatggctgaagcaaacaaagcatttgctcactaccgttggtaagataaaagcttttaccctgagtgtgttctatattaatgaattttcattaagcgttcatgcttagggcatcgccatatctatcgtatttattcagtaatataaactggaaggagaaaaaatacatggctagagaattttcattagaaaaaactcgtaatatcggtatcatggctcacattgatgctggtaaaacgactacgactgaacgtattctttattacactggccgtatccacaaaattggtgaaacacacgaaggtgcttcacaaatggactggatggagcaagaacaagaccgtggtattactatcacatctgctgcaacaacagcagcttgggaaggtcaccgtgtaaacattatcgatacacctggacacgtagacttcactgtagaagttgaacgttcattacgtgtacttgacggagcagttacagtacttgatgcacaatcaggtgttgaacctcaaactgaaacagtttggcgtcaggctacaacttatggtgttccacgtatcgtatttgtaaacaaaatggacaaattaggtgctaacttcgaatactctgtaagtacattacatgatcgtttacaagctaacgctgctccaatccaattaccaattggtgcggaagacgaattcgaagcaatcattgacttagttgaaatgaaatgtttcaaatatacaaatgatttaggtactgaaattgaagaaattgaaattcctgaagaccacttagatagagctgaagaagctcgtgctagcttaatcgaagcagttgcagaaactagcgacgaattaatggaaaaatatcttggtgacgaagaaatttcagtttctgaattaaaagaagctatccgccaagctactactaacgtagaattctacccagtactttgtggtacagctttcaaaaacaaaggtgttcaattaatgcttgacgctgtaattgattacttaccttcaccactagacgttaaaccaattattggtcaccgtgctagcaaccctgaagaagaagtaatcgcgaaagcagacgattcagctgaattcgctgcattagcgttcaaagttatgactgacccttatgttggtaaattgacattcttccgtgtgtattcaggtacaatgacatctggttcatacgttaagaactctactaaaggtaaacgtgaacgtgtaggtcgtttattacaaatgcacgctaactcacgtcaagaaatcgatactgtatactctggagatatcgctgctgcggtaggtcttaaagatacaggtactggtgatactttatgtggtgagaaaaatgacattatcttggaatcaatggaattccctgagccagttattcacttatcagtagagccaaaatctaaagctgaccaagataaaatgactcaagctttagttaaattacaagaagaagacccaacattccatgcacacactgacgaagaaactggacaagttatcatcggtggtatgggtgagcttcacttagacatcttagtagaccgtatgaagaaagaattcaacgttgaatgtaacgtaggtgctccaatggtttcatatcgtgaaacattcaaatcatctgcacaagttcaaggtaaattctctcgtcaatctggtggtcgtggtcaatacggtgatgttcacattgaattcacaccaaacgaaacaggcgcaggtttcgaattcgaaaacgctatcgttggtggtgtagttcctcgtgaatacattccatcagtagaagctggtcttaaagatgctatggaaaatggtgtcttagcaggttatcctttaattgatgttaaagctaaattatatgatggttcataccatgatgtcgattcatctgaaatggccttcaaaattgctgcatcattagcacttaaagaagctgctaaaaaatgtgatcctgtaatcttagaaccaatgatgaaagtaactattgaaatgcctgaagagtacatgggtgatatcatgggtgacgtaacatctcgtcgtggacgtgttgatggtatggaacctcgtggtaatgcacaagttgttaatgcttatgtaccactttcagaaatgttcggttatgcaacatcattacgttcaaacactcaaggtcgcggtacttacactatgtacttcgatcactatgctgaagttccaaaatcaatcgctgaagatattatcaagaaaaataaaggtgaataatataacttgttttgactagctagcctaggttaaaatacaaggtgagcttaaatgtaagctatcatctttatagtttgattttttggggtgaatgcattataaaagaattgtaaaattctttttgcatcgctataaataatttctcatgatggtgagaaactatcatgagagataaatttaaatattatttttaattagaataggagagattttataatggcaaaagaaaaattcgatcgttctaaagaacatgccaatatcggtactatcggtcacgttgaccatggtaaaacaacattaacagcagcaatcgctactgtattagcaaaaaatggtgactcagttgcacaatcatatgacatgattgacaacgctccagaagaaaaagaacgtggtatcacaatcaatacttctcacattgagtaccaaactgacaaacgtcactacgctcacgttgactgcccaggacacgctgactacgttaaaaacatgatcactggtgctgctcaaatggacggcggtatcttagtagtatctgctgctgacggtccaatgccacaaactcgtgaacacattcttttatcacgtaacgttggtgtaccagcattagtagtattcttaaacaaagttgacatggttgacgatgaagaattattagaattagtagaaatggaagttcgtgacttattaagcgaatatgacttcccaggtgacgatgtacctgtaatcgctggttcagcattaaaagctttagaaggcgatgctcaatacgaagaaaaaatcttagaattaatggaagctgtagatacttacattccaactccagaacgtgattctgacaaaccattcatgatgccagttgaggacgtattctcaatcactggtcgtggtactgttgctacaggccgtgttgaacgtggtcaaatcaaagttggtgaagaagttgaaatcatcggtttacatgacacatctaaaacaactgttacaggtgttgaaatgttccgtaaattattagactacgctgaagctggtgacaacattggtgcattattacgtggtgttgctcgtgaagacgtacaacgtggtcaagtattagctgctcctggttcaattacaccacatactgaattcaaagcagaagtatacgtattatcaaaagacgaaggtggacgtcacactccattcttctcaaactatcgtccacaattctatttccgtactactgacgtaactggtgttgttcacttaccagaaggtactgaaatggtaatgcctggtgataacgttgaaatgacagtagaattaatcgctccaatcgcgattgaagacggtactcgtttctcaatccgtgaaggtggacgtactgtaggatcaggcgttgttactgaaatcattaaataatttctaatttcttagattttatataaaaagaagatccctcaatcgaggggtctttttttaatgtgtaaattttgtaatggctattcgatttagaagaacaataattgatgaaagactgactaataaaacttataactgataatactgtttaaataaaattgttgagtcttggacattgtaaaatgctcccttcaaagttttcattttttcaatgtctactttgaagggagcatttcattagtttatgtctcagattcatatctttcaattaatttaaatgcttaatttgttttaaatacttgctctaattcaatgatttttaaaaatacagctacagcgtattttaatgatttttcatcaatatcaaatttgggattatggtgtggcgctgtaatacctttactttcattaccacaaccagtcagaaagaatgcacctggtcgtactttcaaataatgtgaaaaatcttctccaatcatcattaaatctgattcattaaagcgtacatgtaagtcatttgttgcttctttaataacttgatatgctttctcgttattatggacaggcaaataccctttaatataattcaaatcatagttaatatcatttgctattgctaaaccttgtaaaagcttatccattttgtccattacatgattctgtatatctgaatcgaaagttctaactgtacctttacaaaatgcttgatcaggaataacgctatctgtggtgcctgcttgaatcattccaaatgaaagtacagcttgtttaactggatcgatcgtacgtgaaattattttttgtgcacttaaaatgaactctgccatgattactattgggtcaatggtttcatgaggtttggcaccatgaccgccacgacctttaattgtgacactaaattcatctggagaggccatgattgcccccgcacgtgaatgaatagttccagtaggataaccactccataaatgtgtaccgtaaattctatctacattttccagacatccagcatctatcatttcttgagaaccacctggcatgatttcttcaccgtactggaatattaatacaacattaccttctaataaatgtttatgttcatctaaaatctctgctacagtaagtaaaattgctgtatgaccatcatgcccacacgcatgcatacatcctggatttttagacttataaggcacatcgtttaattcctcgacaggtaacgcatcaaagtcagctcttaatgcaatggtaggtcctgtgcccaagcctttaaatgtggctttgataccattgcggccgataggagtttcaatatcacaagataactggcttaattggttaacaatataatcatgtgtttgaaattcttcaaaagataactcaggatattggtgtaaataacgtctgagttgaattgttttattttctttattatttgctagttggaaccaatctaacacccttatcactactttctaaaataatgtttatagtataacattttatgaaattatcgtactaaatgattgctttgagatattttatctatgaatgataaggctttcaagttatgtagaattactgtatgataaaggtattaccaaacaatacttaagggggattatatactgtggttcaatcattacatgagtttttagaggaaaatataaattatctaaaagaaaatggtttgtataatgaaatagatacaattgaaggtgcaaacggaccagaaatcaaaatcaatgggaaatcatacattaacttatcttcaaataattatttaggactagcaacaaatgaagatttgaaatcagctgcaaaagcagctattgatacacatggagtaggtgcaggcgctgttcgtacaatcaatggtacattagatttacacgacgaattagaagaaacactagcaaaatttaaaggaacagaagctgcaatagcttatcaatcaggatttaattgtaatatggctgctatttcagctgtcatgaataaaaatgatgctattttatcagatgagcttaatcatgcatcaattattgatggatgtcgcttatctaaagctaaaattattcgagttaaccattcagacatggatgatttacgtgcgaaagcaaaagaagcagttgaatcaggtcaatacaataaagtgatgtatatcactgatggcgtttttagtatggatggtgatgtggctaaattacctgaaattgtagaaattgcagaagaatttggtttattaacttatgtagacgacgctcatggttcaggtgttatgggtaaaggcgctggtacggttaaacattttggtttacaagataaaatcgatttccaaataggtacgctttctaaagcaattggtgtcgttggcggttatgtagcaggtacaaaagagttaatagattggttaaaagcacaatcacgaccattcttattctctacatcattagcacctggggataccaaagcaataactgaagcagttaaaaagttaatggattcaactgaattacatgataaattatgggacaatgcacaatatttaaaaaatggattgtcaaaattaggatatgatacaggtgagtcagaaactccaattacaccagtaattattggtgatgaaaaaacaactcaagaatttagtaagcgtttaaaagacgaaggtgtctatgtgaaatctatcgttttcccaacagtaccaagaggtacaggacgtgtaagaaatatgcctacagctgcacatacaaaagacatgttagatgaagcaattgcggcttatgaaaaagtaggaaaagaaatgaagttgatttaatatttatttattcccacggcaaatattgtcgtgggctttttttaaatgtttagtttattaacagtaagttcttataacaatgtttagtgctcccaaaaattaaagttttaattttaaaagcatcttgtaaaatttagttgtatttttttcaaagaaattcattttgattatttttgataatgagcattttaatagtaatacatgtttatagtgtgtagtatatgtctatactagtagtaactatatagagaaagtaggaataaactatgtcacaagatgtaaatgaattaagtaagcaaccaacgccagataaagcagaagataacgcatttttcccatcaccatattcccttagtcaatatacagcacctaaaacagattttgatggtgttgaacacaaaggtgcctataaagatggtaaatggaaagtattgatgattgctgctgaagagagatatgtattattggaaaatggaaaaatgttctctacgggtaatcatcctgttgaaatgttattacctttacatcatttaatggaagcaggttttgacgttgatgttgcgacattatctggttatccagttaaattagaattatgggctatgccaactgaagacgaggcagttataagtacttataataaattgaaagaaaaattaaaacagccaaaaaaattagcagatgtgattaaaaatgaattaggacctgattcagattatttatctgtctttatcccaggcggacatgctgcagttgttggtatttctgaaagtgaggatgttcaacaaacattagattgggcattagacaatgaccgctttatagttacattatgtcatggaccagcagcactactttcagcagggcttaacagagaaaaatctacattagaaggatactctgtttgtgtcttccctgactcattagatgaaggtgcaaatattgaaataggttatttacctggacgcttgaaatggttagttgctgatttattaactaaacaaggattaaaagtagttaacgacgatatgacaggaagaacgttaaaagatcgtaaattattaacaggtgacagtcctttagcttcaaatgagttaggaaaattagcagttaatgaaatgttaaatgcaatacaaaataaataattaaatattaattagaggagcctcatatgtaaatgtatgagggctcttttttttggcaaaatttaagtgatacttgtaaaatagaacctattatgagtatgatttaagaaaacgcttgcaaaactaataaccgcaactagcgatatggaggaaacatgatgtcttatagcattggaattgattatggaacagcttcaggccgtgtgtttttaattaatacaactaacggtcaagtagtatcaaaatttgtgaaaccatatacacatggtgtcattgaaagtgaattaaatggtttgaaaataccacatacatatgcacttcaaaatagtaatgattatttagaaattatggaagaaggaatatcatatatagtacgtgaatcaaaaatagatccagacaatatagtaggtattggtatagactttacttcatctactattatttttactgacgaaaatcttaacccggtacataatttaaaacaatttaaaaacaatccacatgcgtatgtgaaactttggaaacatcatggtgcatataaagaagcagagaaattatatcaaactgctattgaaaataataataagtggttaggccattatggatataatgttagtagtgaatggatgattcccaaaataatggaagtcatgaatcgagcaccagaaattatggaaaaaacggcttatattatggaagcgggcgattggattgtaaataaattaactaataaaaatatacgctcgaattgtggattaggtttcaaagcattttgggaagaagaaacagggtttcattatgatttatttgataaaatagaccccaaattatcaaaagtaattcaagataaagtatctgcaccggttgttaatattggtgaagcagtagggaaactggatgataaaatggcacagaaattaggattatcaaaagagactatggtaagtccttttattattgatgcccatgctagtttattaggtattgggtctgaaaaagataaagaaatgactatggtgatgggaacaagcacatgccatcttatgttaaatgaaaagcaacatcaagtgccaggtatatcaggttctgtaaaaggagcaattattccagaattatttgcttatgaagcggggcaatcagcagtaggtgatttgtttgagtatgtcgctaagcaagcaccaaagtcatatgtagatgaagcagcaaatagaaatatgactgtatttgaattaatgaatgaaaagataaaacatcaaatgccaggtgaaagtgggctcattgctcttgattggcataatggaaatcgaagtgtattaagtgatagcaatttaacaggttgtatctttggattaactttacaaactaagcatgaagatatttatagagcatatttagaagctacagcatttggtactaagatgattatgcaacagtatcaagattggcatatggaagtagaaaaggtatttgcatgtggcggtatacctaaaaagaatgctgttatgatggatatctatgcgaatgtactgaataaaaaactaattgttatggatagtgagtatgcaccagcaataggcgcagcaatattaggtgcagtcagtggtggcgcacataattcaattaatgatgcagttgatgctatgaaagagccaattttatacgaaattaatccagaagcggaaaaagtacaaaggtatgaaacattatttaaagcttataaggctttacatgatatccatggttataaaaaagctaatataatgaaagatatccagagtttaagagttgagggataaaaaatttaatttgacagtaattagcaataataaacgctataaattactaaaatcaattaatacaactagaatttccatttacagaaatatcagcaacatgtacatgtcatatatacaagaaagcgcttttatattataattattatgaaaatgaatattatgtccgcttgtgatggactatagctatatagaagagacaaaggagatatttctatgaaaaaaattatgattactggtgcattaggacaaattggtacagaattagttgttaagtgcagagaaatttatgggacagataatgttcttgctacagatattagggaacctgaagcagactcacctgtacaaaatggaccatttgaaatcttagacgtaacagatcgtgaccgtatgtttgagttagttagggactttgaagcggatagtctaatgcatatggcagcattattatcagcaactgctgagaaaaatccaattctagcttgggatttaaatatgggtggattaatgaatgcattagaagctgcaagaacttataatttgcactttttcacaccaagttcaattggtgcatttggagactcaactcctaaagttaatacgccacaagtaacgattcagcaacctacgacaatgtatggtgtaaataaagtagctggagaattattgtgtcaatactatttcaaacgttttggtgtagatacaagaagtgttagattcccaggtttaatctcgcatgttaaagagccaggtggcggtactacagactatgctgttgaaatatacttcaaagcagtaagagagggtcattatacaagcttcatagataaaggcacgtatatggatatgatgtatatggatgatgcaattgaagcaattattaaacttatggaagcagacgacgctaaattagaaactagaaatggttataatttgagcgcaatgagttttgatccagagatggtaaaagaagcaattcaagaatactatcccaattttacattagattacgatgttgatcctattagacaaggtatcgctaatagttggccggattctattgatacaagctgttcacgtggcgaatggggatttgatcctaaatatgatttagcgagcatgactaaattaatgttagaagctattgaacaaaaagatactgttaaaaataataactaatcatttccattcactttaatacacggaatgatattttaaattactctttattttaataaactagtgcatgaattctaatattattcattatacatattgaattcgcgagcttagttcattttaaagtaaagagttttttgtatgtaaagtatattagtaaaacacagattacttgtctctgtgaaattaatacgtttatactaaaagatatagtctttctagaaatctgttaattaattttgaatttttagaaaatttgttgaacagcaaaatatggattgttataatttaagttaaacaaattcttatacaatattattaggaggcaatcaccatgtcacaagcagttaaagttgaacgacgagaaacattaaaacaaaaaccaaatacatctcaactaggttttggtaaatattttactgattatatgttgagttatgattatgatgcagataaaggatggcatgatttgaagatagtaccttatggtcctattgaaatttcacctgctgcacaaggtgttcattatggtcaatcggtattcgaaggattaaaagcatataaaagagatggggaagttgcacttttccgtcctgaagaaaattttaagcgtcttaataactcgttagcacgattagaaatgcctcaagtagacgaagcagaattgttagaggggctaaaacaattagttgatatagaaagagattggattcctgaaggggaaggtcaatcattatatattcgtccatttgtttttgcaacagaaggggcacttggcgttggtgcatcacatcagtataaattattaattattttatctccttcaggtgcatattatggtggtgagactttaaaaccaactaaaatctatgtagaagatgaatatgtgcgtgctgttcgtggcggtgtaggctttgcaaaagttgcaggtaactatgcggcaagtttattagcacaaacaaatgcaaataaattaggttatgaccaagtattatggcttgatggtgttgaacagaaatatatcgaagaagttggtagcatgaatattttcttcgttgaaaatggaaaagtaattacaccagagttgaatggcagtattttacctggtattacacgtaaatctattatcgaattagctaaaaacttaggatatgaagtcgaagagcgccgcgtttcaatcgatgaattattcgaatcatatgataaaggtgagttaacagaagtatttggtagtggtactgcagcagttatttcacctgtgggtacattgagatacgaagatcgtgaaatcgttattaataataatgagactggtgaaattactcaaaaattatacgacgtctatactggtattcaaaatggtactttagaagataaaaatggttggagagtcgttgtaccaaaatattaataaaaattgaatataatcatgaaaacaatatgtaaaagttaatcatgactaaaatccctttcaatgaagcgaagcatggtaataaattaagtttacaatgtttattgttaagtattgaaggggatttcacttattattatatttaattcaatatttaaaaagaacaatactacgagttcattttcagggaaataacgaacatcatagaatcagcataatacgaaataaataaataggagtattgatattaatggaatggatattatttgataaagatggcacgttaattgaatttgatagaagttgggaaaaaataggggtacgatttgtacaatcattgcttgagactttcccagtacataataaagaagctgctttaagacaactcggtgtcattaaagaatctattgatccaaaatcagtgatgggttcaggatctttacaacaaattatccaggcatttaatgatgtgacgggacaagatacaaccgactggtccaagtcaacaagtcaaaagctggtagatgaacgtattcctgaaattaattgggtagaaggtgttaaagaagcacttatcgatttgaaagcaaaaggctatcaacttggtattgttacgagtgatactaaaaaaggtgtagaacaatttttagcacataccaatgctacctcgttgttcgatttgatcatttctaccgaagcggatgcctatgagaagccaaatcctaaagtattatcgcctttatttgagcaatataatgtagatcctcagaaagtagctatagtaggagacactgctaatgatatgaagacagcaagtaatgcaaatttaggtatggcaataggtgtattaacaggtattgcaacaaaagaagaattacatgaagctgatattattttaaatagtgcggcagatattttagaagctttaaattaaaaagaaagacatagtgtatatgtgaattaatgtattcgatagaattgataatgtaatcgatgatatctatggaatatacattgaatataaacatatacgctatgtctttagtcttttatcgtgtatctacttgtcgatatgtttgaataattcgagcaattttgtctatcataggatttaaagattcggggtccttatggatatcatattcattaatattgatacgtacaactggacatgcattaaagctattaatccaatcgtcatagcgtttaaatagctttttccagtattcagggtctgtattaatttccatttcgcgaccacgttcaataatacgatcaatgacctcatcatagttacattctaaataaatcattacatcaggtttaggaaaataaggtgtcatgaccatggcattaaataagtctgaatatgttttgaaatcttctttactcattgtgccttcttcttcatgcatttttgcaaaaatatcaacatcttcataaattgatcgatcttggacaaagccaccaccatattcaaacatacgcttttgttctttaaaacgttcagctaagaagtaaatttgcaaatggaaactccatcgttcaaaatcgctgtaaaatttatctaaatatggattatgttcgacattttcaaaagacgttttaaagtttaatttatctgcaagtgcttgcgttagtgttgattttccaacaccaactgtacctgcaatggttataatggcattttgtggaataccgtaattattcattggtaatatctcctatcataggtaatataatatgtaatatatcttcgtaatcttgttcatttttaagaaaatcaatagaagttgtatcgattaaaactacatttgaaccattactttgtaaggactcataatactcacgataatctttttttaactttaacagatattcatcttctatttgatgctcaaaactacggttacgtttagcaattctagattttaacacatcaaggtctgcatctaaaaagataatcatattcggcataatcatatcttcagttaaaatatcataaattttactgaatttctgaaattcaacagaactcaaagtatttttagcaaatatcttatttttatgtatatgataatcactaactacaccttgatttagttgtgttacatcttgaaattgcttatatctattgcataaaaagaacatttcagtttgaaaactccatttagagatatcttcataaaagtctgataaaaatggattttctgtgatgatttctttttcttcataaaaatctaaagtttgacttaatttgtgtgcaagtgaagatttacctacgccaataggaccttcaattgctataaaaggtttgttcatattcacatctccaaatgttaaaatagacattgagtattgtaccataagtgaggtatctggacataaatgacaaatgatatatattttatgacattagcgattgaagaagctaaaaaagcagctcaactaggcgaagtacctataggtgctatcatcactaaagatgatgaagttatcgctagagcacataatttaagagaaacactacaacaaccaacggcgcatgctgaacatattgcaattgaacgtgcagccaaagtgttaggtagttggcgtttagaaggttgcacattatatgtaaccttagaaccatgtgtcatgtgcgcaggaacaattgtaatgagtcgcattccaagagtcgtctatggcgcagatgatcctaaaggtggttgtagtggcagtttaatgaatttattgcaacaatctaattttaatcatcgtgcaattgttgataaaggtgtacttaaagaagcatgtagcacattattaacaacattttttaaaaacttaagagccaataagaaatccaccaattagacgatagtacatactaattaaaatttgttagaattacattatatgataaattaatgacaatataaatgttaatagaaaagtatgtgcgctgagtatatattcttatttaagaacaagattttaaatttacgaaacgaggtaacataatgataaaactaatagccactgatatggatggcacgctacttaatgcagcacatgaaatttctcaacctaatattgatgcgattaaatacgctcaagaacaagggataacggttgttatcgcgacaggtcgagcattttatgaagcacaagcaccagttgctgacacagatttaacagtaccatatatttgtttgaatggtgctgaagtacgtgatgaaactttcaatgtaatgagcacttcacaccttaataaatcgctagtacacaaaattacaaatgttttaaaagatgcaggtatttattatcaagtatacacgagtcgtgcgatttatactgaagatccacaaagagatttagacatttacatagatattgctgagcgtgcaggtcaacatgcaaacgttgagcgtattaaaaatggtattcaaagacgcatagataatggtacgttgaaagttgttgataattatgatgctattgaaaacatacctggtgaattaattatgaaaatattagcatttgatggaaatttagaaaaaattgacaaagctagtaaaattttagctgaatctccgaatttagctatatcatcatcttcgagaggaaatatagaaataacgcattcagatgcacaaaaaggtattgcgctagaaacaattgccgaaagattagggattgaaatgaaagaagtcatggcaataggtgacaatttaaatgacttatcaatgttagagaaagttggctatccagttgcgatggaaaatggtgcagaagaagttaaaaaaatagcgaaatatgtcacagatacgaatgaaaatagtggtgttggaaaagctattatgaaattattacgtgaacaacaagtttaataaaaaaagaggggtcaaatatgaaaggattaattattattggcagtgcacaagtgaattcacatacaagtgcactagcaagatacttaactgagcattttaaaacacatgatattgaagcggaaatattcgatttagcagaaaaaccgttaaatcaattagatttttcaggaacaacaccgtctattgatgaaatcaaacaaaatatgaaagatttaaaagagaaagcaatggcggcggactttttaatattaggaacgccaaactatcatggttcatattctggaatattgaaaaatgcattagatcatctaaatatggattattttaaaatgaaacctgtaggcttaataggaaatagtggtggtattgttagttcagagccattgtcacatttaagagtaatcgtcagaagtttactaggcattgctgtaccaactcaaatagcaacacatgattctgattttgctaaaaatgaagatggttcatattacttaaatgatagtgaattccaattacgagcaagattatttgtcgatcaaattgtatcttttgtgaataatagtccatatgaacatttaaaataatattaaaaaatatgtaaatatacattaaaaataggtatgtagcttaaggtatttcattgagaatgcttttaagtcacatgcctattttttgttctaatgcaccaatagtaagcctttgatattactgttgtgagcaatgttattaattaaaataagatgtaatagcgaattgaaaacaagcttagattaaaagtgagttttaaaaatatagataaataatttaaagcaattaaagaaaaaaagtattaaaaattgcaattcttaaactgtgattcatattaatatttgtagcaaataacattgtaaaataaagaaaaataattaaagtattgcactttattgaaatttatattacgatagcaatgcagaaatttatatatgcaaaatattatatttatcaaattttgatattttaaaggagtattattaaatgaataataaaaagacagtaacaaatagaaaaggcatgataccaaatcgattaaacaaattttcgataagaaagtattctgtaggtactgcttcaattttagtagggacaacattgatttttgggttaagtggtcatgaagctaaagcggcagaacatacgaatggagaattaaatcaatcaaaaaatgaaacgacagccccaagtgagaataaaacaactgaaaaagttgatagtcgtcaactaaaagacaatacgcaaactgcaactgcagatcagcctaaagtgacaatgagtgatagtgcaacagttaaagaaactagtagtaacatgcaatcaccacaaaacgctacagctagtcaatctactacacaaactagcaatgtaacaacaaatgataaatcatcaactacatatagtaatgaaactgataaaagtaatttaacacaggctaaagatgtttcagctactcctaaaacaacgactattaaaccaagaacattaaaccgtatggctgtgaacacagtagcagcaccacaacaaggtacaaatgttaatgataaagttcatttttcaaatattgatattgctattgataaaggacacttaaataaagatactggcaaaacagaattttgggcaacttcaagtgatgttttaaaattaaaagcgaattacacaatcgatgattctgttaaagagggcgatacatttacttttaaatatggtcaatatttccgtccaggatcagtaagattaccttcacaaactcaaaatttatataatgcccaaggtaatattattgcaaaaggtatttatgacagtacaacaaacacaacaacgtatacttttacgaattatgtagatcaatatacaaatgttagcggtagctttgaacaagtcgcatttgcgaaacgtgaaaatgcaacaactgataaaactgcttataaaatggaagtaagtttaggtaatgatacatatagcgaagaaatcattgtcgattatggtaataaaaaagcacaaccgcttatttcaagtacaaactatatcaacaatgaagatttatcgcgtaatatgactgcatatgtaaatcaacctaaaaatacatatactaaacaaacgtttgttactaatttaactggatataaatttaatccaaatgcaaaaaacttcaaaatttacgaagtgacagatcaaaatcaatttgtcgacagtttcaccccagatacttcaaaacttaaagatgttactaatcaatttaatattacttacagcaatgataataagactgcaacagttgatttaatgaatggtcaaacaagtagtaataaacaatacatcattcaacaagttgcgtatccagataatacatcaacagataatggaaaaattgattatactttagacactgacaaaactaaatatagttggtcaaatagttattcaaatgtgaatggctcatcaactgctaatggcgaccaaaagaaatataatctaggtgactatgtatgggaagatacaaataaagatggtaaacaagatgccaatgaaaaagggattaaaggtgtttatgtcattcttaaagatagtaacggtaaagaattagatcgtacgacaacagatgaaaatggtaaatatcagttcactggtttaagcaatggaacttatagtgtagagttttcaacaccagccggttatacaccgacaactgcaaatgcaggtacagatgatgctgtagattctgatggactaactacaacaggtgtcattaaagacgctgacaatatgacattagatagtggattctacaaaacgccaaaatatagtttaggtgattatgtttggtacgacagtaataaagatggtaaacaagattcgactgaaaaaggaattaaaggtgttaaagttactttgcaaaacgaaaaaggcgaagtaattggtacaactgaaacagatgaaaatggtaaataccgctttgataatttagatagtggtaaatacaaagttatctttgaaaagcctgctggtttaactcaaacaggtacaaatacaactgaagatgataaagatgccgatggtggcgaagttgatgtaacaattacggatcatgatgatttcacacttgataatggctactacgaagaagaaacatcagatagtgactcagattcagacagcgactcagactcagattcagacagcgactcagactcagatagcgactcagattcggacagcgactcagattcagatagcgactcagattcggacagcgattcagactcagacagcgactcagactcagacagtgattcagattcagacagcgattcagactcagatagcgactcagattcggacagcgattcagactcagatagcgactcagattcagacagcgactcagactcagacagtgattcagattcagacagcgactcagattcagatagcgactcagactcagacagtgattcagattcagacagcgattcagatacagatagcgattcagactcggatagcgactcagactcggatagcgattcagactcagatagcgattcagactcagactcggatagcgattcagattcagacagcgactcagattcggacagcgattcagactcagatagcgactcagactcagaaagtgatgccgattcagatacagatagcgattcagatgcaggtaaacatactccggctaaaccaatgagtacggttaaagatcagcataaaacagctaaagcattaccagaaacaggtagtgaaaataataattcaaataatggcacattattcggtggattattcgcggcattaggatcattattgttattcggtcgtcgtaaaaaacaaaataaataatatgattaacttaaccaggtccatgtggcctggttttttctgtttagaaattcccagatataaaacaaaaaacctttaaggaatagatacaatttaatttgttacagaaatgtaattgtctatgaattagaaaagctaagatattaattttaagggcaaataatactattttttatgataattaaataaagattacaaaactcataaaaacttttatttaaacgcaaatgttaaataacgttttacgataaagaaaaataattaaagtattgtgctttatctaaaagtgtaatactatattgatatacatttttgtatttaaaacaattgtattatttaaaaatttgatgaattaggagtaatctaatgctaaacagagaaaataaaacggcaataacaagaaaaggcatggtatccaatcgattaaataaattttcgattagaaagtacacagtgggaacagcatcaattttagtaggtacaacattaatttttggtctggggaaccaagaagcaaaggctgcagaaagtactaataaagaattgaacgaagcgacaacttcagcaagtgataatcaatcgagtgataaagttgatatgcagcaactaaatcaagaagacaatactaaaaatgataatcaaaaagaaatggtatcatctcaaggtaatgaaacgacttcaaatgggaataaatcaatagaaaaagaaagtgtacaatctaccactggaaataaagttgaagtttcaactgccaaatcagatgagcaagcttcaccaaaatctacgaatgaagatttaaacactaaacaaactataagtaatcaagaagcgttacaacctgatttgcaagagaataaatcagtggtaaatgctcaaccaactaatgaggaaaacaaaaaggtagatgccaaaactgaatcaactacattaaatgttaaaagtgatgctatcaagagtaatgctgaaactcttgttgataacaatagtaattcaaataatgaaaataatgcagatatcattttgccaaaaagtacagcacctaaacgtttgaatacaagaatgcgtatagcagcagtacagccatcatcaacagaggctaaaaatgttaatgatttaattacatcaaatacaacattaactgtcgttgatgcagataaaaacaataaaatcgtaccagcacaagattatctagaattaaaatcacaaattaaagttgatgacaaagttaaatcaggtgattatttcacaataaaatactcagatacagtacaagtatatggattgaatccggaagatattaaaaatattggagatattaaagatccaaataatggtgaaacaattgcgactgcaaaacatgatactgcaaataatttaattacatatacatttacagattatgtcgatagatttaattctgtacaaatgggaattaattattcaatttatatggatgctgatacaattcctgttagtaaaaacgatgttgagtttaatgttacgataggtaatactacaacaaaaacaactgctaacattcaatatccagattatgttgtaaatgagaaaaattcaattggatcagcgttcactgaaacagtttcacatgttggaaataaagaaaatccagggtactataaacaaacgatttatgtaaatccatcggaaaattctttaacaaatgccaaactaaaagttcaagcttaccactcaagttatcctaataatatcgggcaaataaataaagaggtaacagatataaaaatatatcaagttcctaaaggttatacattaaataaaggatacgatgtgaatactaaagagcttacagatgtaacaaatcaatacttgcagaaaattacatatggcgacaacaatagcgctgttattgattttggaaatgcagattctgcttatgttgtaatggttaatacaaaattccaatatacaactagcgaaagcccaacacttgttcaaatggttacattaagttcaaacaatagtaaatctgcctcaatgggtaatgctttaggattcactaataaccaaagtggcggagctggtcaagaagtatataaaattggtaactacgtatgggaagatactaataaaaacggtgttcaagaattaggagaaaaaggcgttggcaatgtaactgtaactgtatttgataataatacaaatacaaaagtaggagaagcagttactaaagaagatgggtcatacttgattccaaacttacctaatggagattaccgtgtagaattttcaaacttaccaaaaggttatgaagtaaccccttcaaaacaaggtaataacgaagaattagattcaaacggcttatcttcagttattacagttaatggcaaagataacttatctgcagacttaggtatttacaaacctaaatacaacttaggtgactatgtctgggaagatacaaataaaaatggtatccaagaccaagatgaaaaaggtatatctggcgtaacggtaacattaaaagatgaaaacggtaacgtgttaaaaacagttacaacagacgcagatggcaaatataaatttactgatttagataatggtaattataaagttgaatttactacaccagaaggctatacaccgactacagtaacatctggtagcgacattgaaaaagactctaatggtttaacaacaacaggtgttattaatggtgctgataacatgacattagatagtggattctacaaaacaccaaaatataatttaggtaattatgtatgggaagatacaaataaagatggtaagcaggattcaactgaaaaaggtatttcaggcgtaacagttacattgaaaaatgaaaacggtgaagttttacaaacaactaaaacagataaagatggtaaatatcaatttactggattagaaaatggaacttataaagttgaattcgaaacaccatcaggttacacaccaacacaagtaggttcaggaactgatgaaggtatagattcaaatggtacatcaacaacaggtgtcattaaagataaagataacgatactattgactctggtttctacaaaccgacttacaacttaggtgactatgtatgggaagatacaaataaaaacggtgttcaagataaagatgaaaagggtatttcaggtgtaacagttacgttaaaagatgaaaacgacaaagttttaaaaacagttacaacagatgaaaatggtaaatatcaattcactgatttaaacaatggaacttataaagttgaattcgagacaccatcaggttatacaccaacttcagtaacttctggaaatgatactgaaaaagattctaatggtttaacaacaacaggtgtcattaaagatgcagataacatgacattagacagtggtttctataaaacaccaaaatatagtttaggtgattatgtttggtacgacagtaataaagacggcaaacaagattcaactgaaaaaggtatcaaagatgttaaagttactttattaaatgaaaaaggcgaagtaattggaacaactaaaacagatgaaaatggtaaatatcgtttcgataatttagatagcggtaaatacaaagttatttttgaaaagcctgctggcttaacacaaacaggtacaaatacaactgaagatgataaagatgcagatggtggcgaagttgacgtaacaattacggatcatgatgatttcacacttgataacggatacttcgaagaagatacatcagatagcgactcagattcagatagcgactcagactcagacagcgactcagattcagacagcgactcagactcggatagcgattcagattcagacagtgattcagattcagacagcgattcggattcagacagcgactcagactcggatagcgactcagactcagatagcgattcagattcagatagcgattcggactcagacagtgattcagattcagacagcgactcagattcagatagcgattcagactcagacagtgattcagattcagatagcgactcagactcagatagcgattcagaatcagacagcgattcagacagcgactcagactcggatagcgactcagactcagacagcgattcagactcggatagcgattcagattcggacagcgactcagactcagacagtgattcagattcagatagcgactcagactcagatagcgactcagattcagacagcgattcagactcagatagtgactcagattcggacagcgattcagactcagatagcgactcagattcagactcagatgcaggtaagcacacacctgttaaaccaatgagtactactaaagaccatcacaataaagcaaaagcattaccagaaacaggtaatgaaaatagcggctcaaataacgcaacgttatttggcggattattcgcagcattaggatcattattgttattcggtcgtcgtaaaaaacaaaataaataatacagcttataccaggtccgtgaggcctggttttttatttcaaaatttatgaaatgtatcttatgtttgagattaaatagtgcaattttttaaaaaatataacataaatcaacataaatttaattcatctttacattaaaagtacaaacgaataagaaaagcaattaaacacagtatcaaaccatttaaaacaattgatataaaaaacaaacgaataattaaaaattactagaattaatttattcaaaccaaagtgtaaaataacagtcttagataaataaatttatttaaagtattgtgctttatctaaaaatgtattacgatgggaatacaaatttttatatgtaaaaatattaattttttgcaaatattgatattttaaaggagatttatatgattaacagggataataaaaaggcaataacaaaaaagggtatgatttcaaatcgcttaaacaaattttcgattagaaagtatactgtaggaactgcatcgattttagtaggtacgacattgatttttggtctagggaaccaagaagctaaagctgctgaaaacactagtacagaaaatgcaaaacaagatgatgcaacgactagtgataataaagaagtagtgtcagaagctgaaaataattcgacaacagaaaatgattcaacaaatccaattaagaaagaaacaaatactgattcacaaccagaagctaaagaagaatcaactaaatcaagtactcaacaacagcaaaataacgttacagctacaactgaaactaagcctcaaaacattgaaaaagaaaatgttaaaccttcaactgataaaaccgcgacagaagatacatctgttattttagaagagaagaaagcaccaaataatacaaataacgatgtaactacaaaaccatctacaagtgaaattcaaacaaaaccaactacacctcaagaatctacaaatattgaaaattcacaaccgcaaccaacgccttcaaaagtagacaatcaagttacagatgcaactaatccaaaagaaccagtaaatgtgtcaaaagaagaacttaaaaataatcctgagaaattaaaagaattggttagaaatgatagcaatacagatcattcaactaaaccagttgctacagctccaacaagtgttgcaccaaaacgtgtaaacgcaaaaatgcgctttgcagttgcacaaccagcagcagttgcttcaaacaatgtaaatgatttaattaaagtgacgaagcaaacaatcaaagttggcgatggtaaagataatgtggcagcagcgcatgacggtaaagatattgaatatgatacagagtttacaattgacaataaagtcaaaaaaggcgatacaatgacgattaattatgataagaatgtaattccttcggatttaacagataaaaatgatcctatcgatattactgatccatcaggagaggtcattgctaaaggaacatttgataaagcaactaagcaaatcacatatacatttacagactatgtagataaatatgaagatataaaatcacgcttaactctatattcgtatattgataaaaaaacagttccaaatgagacaagtttgaatttaacatttgctacagcaggtaaagaaacaagccaaaatgtcactgttgattatcaagatccaatggtccatggtgattcaaacattcaatctatctttacaaaattagatgaagataagcaaactattgaacaacaaatttatgttaacccattgaaaaaatcagcaaccaacactaaagttgatatagctggtagtcaagtagatgattatggaaatattaaactaggaaatggtagcaccattattgaccaaaatacagaaataaaggtttataaagttaactctgatcaacaattgcctcaaagtaatagaatctatgattttagtcaatacgaagatgtaacaagtcaatttgataataaaaaatcatttagtaataatgtagcaacattggattttggtgatattaattcagcctatattatcaaagttgttagtaaatatacacctacatcagatggcgaactagatattgcccaaggtactagtatgagaacaactgataaatatggttattataattatgcaggatattcaaacttcatcgtaacttctaatgactctggtggtggcgacggtactgttaaacctgaagaaaagttatacaaaattggtgactatgtatgggaagacgttgataaagacggtgttcaaggtacagattcaaaagaaaaaccaatggcaaacgttttagttacattaacttacccggacggtactacaaaatcagtaagaacagatgctaaaggtcattacgaattcggtggtttgaaagacggagaaacttatacagttaaattcgaaacgccaactggatatcttccaacaaaagtaaatggaacaactgatggtgaaaaagactcaaatggtagttctgtaactgttaaaattaatggtaaagatgatatgtctttagacactggtttttataaagaacctaaatataatcttggtgactatgtatgggaagatactaataaagatggtatccaagatgcaaatgagccaggaatcaaagatgttaaggttacattaaaagatagtactggaaaagttattggtacaactactactgatgcctcgggtaaatataaatttacagatttagataatggtaattatactgttgaattcgaaacaccagcaggttacacgccaacggttaaaaacactacagctgaagataaagattccaatggtttaacaacaacaggtgtcattaaagatgcagataatatgacattagacagtggtttctataaaacaccaaaatacagtttaggtgattatgtttggtacgacagtaataaagatggcaaacaagactcaactgaaaaaggtattaaagatgtgacagttacattgcaaaacgaaaaaggcgaagtaattggaacaactaaaacagatgaaaatggtaaatatcgtttcgataatttagatagcggtaaatacaaagttatttttgaaaagcctgctggcttaacacaaacagttacaaatacaactgaagatgataaagatgcagatggtggcgaagttgacgtaacaattacggatcatgatgatttcacacttgataacggatacttcgaagaagatacatcagacagtgattcagactcagacagcgattcagactcagatagcgactcagattcagacagtgactcagactcagatagcgattcagactcagaaagcgattcagattcagacagcgactcagactcagatagtgattcagattcagatagcgactcagactcagatagcgactcagattcggacagcgattcagactcagatagcgactcagattcagacagcgattcagactcagatagcgactcagattcagacagtgactcagactcagatagcgactcagactcagacagtgactcagactcagacagcgattcagattcagatagcgactcagactcagatagcgactcagattcggacagcgactcagactcagatagcgactcagactcagacagtgattcagactcagatagcgattcggactcggatgcaggaaaacatacacctgttaaaccaatgagtactactaaagaccatcacaataaagcaaaagcattaccagaaacaggtagtgaaaataacggctcaaataacgcaacgttatttggtggattatttgcagcattaggttcattattgttattcggtcgtcgcaaaaaacaaaacaaataatacaatatgacccaggtccttgtggcctggtttttttataattacacatgcaatagatgtatttttcatataaaataaacaataaagatacggaataaaacttatatgaggcgataatatgaattacattttaggaacaattttagaaagtaaaattacaggtgtagaaaaagcgcaaataaatagattgaagttgttcaaacaacacggcatatcttcaaaatgtgtatatgttaaatggaatccttattcatacacatatgcgaagcaacatcagattgaaaatgatgtatttacaatgtatgactattttcaaaaagcaatcaattataaaaagacaaagcaagttaactggatacagtattgggaaaagtcatgtaggtacacattgaaatttgtggaaaattcaaatgatgtcagaatatatgatgaagagcaatttataatgtatgctcattttttagataaacagtatcatcatttaaactatgtgaattattttgatcataaaagaagaaaagtaaaacgcgaattgtatgatggaagaggctttttaagttgttctcgaattttaggtgaaggacaacggattgtactcgaaaattactatacacctaatggggaaatcgtcatccaaaaatatttcgacgatataaaagggaaaaacacgctcacaaaggttatcttaaatgaagatcagcatcaacaattttttgatacagaagatgaattagttcaatattttctccatcaattatgtaaaaataatgatcaaatcatattagatcgtcctcatgaattaggaaatgttatagcgggattaaatcaaagtattccagttattgttgtgctccacagtacacatttagccgacaccggtaatggtataaaaagtttttataaaacagtgtttaataatttaacacgttataaagcgattgttgtatcaacagaacagcaatgccaagatatttcacaatatattgaaaataaaataccagttatcaatattccggttggctacgtggcaaatttaaagtatcaatttgacatcaatcaaaaggagaaaaatcatatcatatcaattgctcgcctcgttgaaaataaacaaattaaacatcaagttgaagtgatcaagcaattagtaacaaaacatcccaatattcaattgaatatttatggacatggaaatggtttgtcagaatatcgacaacttgtagaagattatcatttatcggaacatgtaaaatttcatggttttaagacgcatattaatgaagagattgctaaagcagaactgatgttatcgacaagtaaaatggaaggttttggcttagcaattttagagtcgctttcagtaggtacaccagtgatcagttatgatgtagattatgggccatcagaactgattcaagatggatttaatggctatttagtacctcaaggtgacatcaatcaaatggttgaaaaggtcgaccaattactaaataatactcaaaaattgcaacagttttcgattaatagcatagaatctgcacaacagtacaatgcaactactatcagtacaaagtggcaaaatattttaaactaagtcaaaagaaaaaagcattttcctagaatcatctatttaacaaacctcgttcatacgaacttacatgtttagttaaatgacataggaaaatgctatttttgtaaaaataaaggtaaagtacatttatataagacgaacaaattggtcccattgtttaattaacgacgctttactatattgttgcgcttttgctaaactaccttttgacagtcgttgttgtacttcaggatgatcaatcacatattttactttatcaaatagggcatcttcatcatttttagtaattaaataaccattgaaatcaggcgtaatcaattcgttaggtccatatttaatatcataactaataactggaacaccatgtgctaaagattcaagtagcgctaaagagaaaccttccatgttacttgttattaaactcaaataggcatcgctatattcttggtctagattgcttaaaaagccgcgtaagtaaacatgattttccaatccatatttttgtatcaattcatttaattttttactttcagaaccaaaaccatacatatgaagctctatttttgggacgtacgatactaagcgtttaattaattcaatttgttgatgtaattgtttttcaggtgaataacgagcaacggaaattaatttaacactgcgctgatctaatgtttggactggtgtatcaattgtttcactatagccgacaggaatattaacaactggaatagtatggttaatacgtttttcaatatctaatttttgctgctcagtagaaacgataattgcacgatatcgagataaattttcaaacatcgctttatatacatttttaaatggcgatgaatctaatgcatcaatatttttaatgtgtgtactgtgaagcacagctactactgggattgactcaggcgttaagttgaaaataggtgctgtgtacacattacgatcactgaaaaataaatccccatgttgatatagttgtttaatgaaaaatgcgcctaattccgtttcattattaaagaaatattgtttgttagcatagtaaacaataattttttgtacttctggtttgccatccttgtaagaaaaatacttttctaattttgtgtcaccttctggattatagaaaaattcacataatgtttgttgtttatcaacaagaatcctactacaacttaaaaagccacgcacatcataaaaatcacgttttacttttcgtctttgactatcaaaatgattcacataatctaatatacgatatttaggatcttgaaaatgggcatacattaagaaacgctcttgatcatatattctaaagtcatgactattttcaacatgttttaaagtataatgacattcatcagtccaatacgacaaccagtcaaatggttcattgcgttctaaatatgttgcttcttggaagaaatcatacatattaatatagtcagaactagtaatataattttgggcatttctatataaatatctattccatgacagaaatacacattgcgctggtcttcccatttctttaaataaatttaaacgattaataattgctttctctatcccagttaaattaacacctaaactattacctacaaaataattcatttacaacaccacttatatctattttttataattatatcacataatatttaattacttcttttaactggaagatgtgtttatttataaaacaacaagttttgatatttataatggtagtagttattcagtcaactacgaccaatatatcattgtagagtttaggaaattgatttatgactcaggcacatcaaatgagaagatttataaaagagatatacaactctagaaggtataataaaaacgcgcaactactgttacgcgtttgaattaatcatatgatattatttgcgatactttaatttagcgaaagcatcatgttgatggatagactcttcattacgacattcgatatcgaaaccgtctaaccaatcaaattcaactaagtccgcggcaattaaacgaattaagtcttcgacaaaacgtggattttcatatgcacgctctgtcacacgtttttcatcaggacgttttaaaatagggtatagaattgaacttgcattagcttccattgcatctaaaattttatttttatagtcatcaactatgtcttgatctttattaatatatgttttaacagtgacaacaccacgttggttgtgcgctgaatactcacttatttcttttgaacaagggcatagcgttgtgacagttgcttcaatagtaagttctttacgtgtaactttatcaccgtcaattgctaatccataagtgacatcggcattaccaactgctttaatatttgtggttggactatagcgatcaaagaaccatttcccagaaacatcaacgcctgccgcattttgtttcatattcgtttgtaaagtgcgtaacacctgataaagtgtattaaattcaagttcaataccattatcatagtgcttttcaacactttcaattatacggctcatattaatacctttttcgtcttttgttaaacttgttgaaaaactaaatgtgccagctgtttgatactggtcaacaagtacagggtacactaagtttttaataccaacttcttctatttcaaataaaaaatctttatgtgtactttgtaagtctgtcatttcgttcttagtagtaggtttcgtgccttcaataggatctacggaaccaaagtgtttccaacgaccttctcgtgtcgataaatcaaattcagtcatttttttcctccgttaagatttaaagtgatatgtccaatatggttcgactgttaaaaagctgtgttgtttaccatcgatttcaggacttgctaattgttttaaaaatggacctgtttgagaagcatgtgcttcaaatgccttaattttaagttctttaaaatctgtaatatcattttgaatatcaggttctccaagagcttcggttgcatcattactgaacgcaactaaagttaaacgagggcgttcttctttaggcatgcgttcaaccgttcgaattacagcgtctgctgttgcttcgtgatcaggatgtactgcatatccaggataaaatgaaataatcaatgatggatttgtatcatcgattaaagatttaatcataccatctatatgttcgtagggttcaaattcgacagttttgtcacgtaaacccatttttcttaaatcagtaataccaataactttacaagcttcttctagttcacgctcacgaatacttggtaatgattcgcgtgttgcaaatgggggattacctaaatttctgcccatttgtcctagggttaaacatgcatatgttacaggtatgcctttttggatataacttgctaatgtgcctgcagatgagaaggtttcatcatcaggatgtggaaatattactaatacatgtctttcgtcagtcatgttgatgcctcctctataaattaaatggtcgctcactaatttgaagtgctgcagcgagttgaccttcgtaattaaaacctgcaattaaaaattcatcatgttcattgacctcaaaatgcgttagaccttgtacataaacccaaccaccatttgatagtttaagaccaatgcgataaggttctttattaccaccttttagttgtgcatgcgtatatgttacttgtatgtttcttaaaaatgtaccagcattaaaaacacgttgatcgaaatggttcgcataggccccatttgtcgtttcaacatgcagatacacaggtttatgttcaaaagaagcaagtaaatctataacttcttgttctttaattggttccaacacgttcactccttacactatcaatgtgtttatctttctattttactaaaaactattcaataattgtatacgattgctcaattatttataaattaattttcatgaagggtaattactcaggattacgcaatcatacagcattagttttttacttttaaaaatcaaaaatttgttggaatttgaaaagtgttaaacattaaaaatgatgctatattaatggtgtatgaatgaattcataagtttttaaaatgtattaaatttgtggaggcatgtaaacaatgaaagtattaaacttaggatcgaaaaaacaagcatcattctatgttgcatgtgagttatataaagagatggcatttaatcagcactgtaaacttggtttagcaactggtggtacaatgacagatttgtatgagcaacttgttaagttattaaataaaaatcagttaaacgtagacaatgtatccacgtttaatttagacgaatatgtaggtttaaccgcatcacatccgcaaagttatcactattatatggatgacatgcttttcaaacaatatccttattttaatagaaagaacattcatattccaaatggagatgccgatgatatgaatgcggaagcgtcaaaatataatgacgttttagaacaacaaggtcaacgtgatattcaaattttaggtattggagaaaatggtcatattggatttaatgaacctggtacgccgtttgacagcgttactcatatcgttgatttgactgaaagtactattaaggctaatagtcgatattttaaaaacgaagatgatgttccaaagcaagccatttcgatgggacttgctaatattcttcaagccaaacgtatcattttactcgcatttggtgaaaagaaacgtgctgctattacacatttattaaatcaggaaatttctgttgatgttccagccacattacttcacaaacacccgaatgttgagatatatttagacgacgaagcttgcccgaaaaatgttgcgaaaattcatgtcgatgaaatggattgattgcaatgtttaattaagaaatgcctcgggaaaggttccaatagaaagataaaaagcattggaaggatgatttttagtggaattacaattagcaattgatttattaaacaaagaagacgcggctgagttagcaaataaagtaaaagattatgtagatatcgtagaaatcggtacgccaatcatttacaacgaaggtttaccagcagttaaacatatggcagacaacattagtaatgtaaaagtattagcagacatgaaaattatggatgcagctgattatgaagttagccaagcaattaaatttggcgcggatgtaattacaatactaggtgttgcagaagatgcatcaattaaagcagctattgaagaagctcataaaaataataaacaattactagttgatatgattgctgttcaagatttagaaaaacgtgcaaaagaactagatgaaatgggtgcggattatattgcagtacacactggttatgatttacaagcagaagggcaatcaccattagaaagtttaagaaccgttaaatctgttattaaaaattctaaagttgcagtagcaggtggaattaaaccagatacaattaaagaaattgtcgctgaaagtcctgatcttgttattgttggtggcggaatcgcaaatgcagatgatccagtagaagctgcaaaacaatgtcgcgctgcaatcgaaggtaagtaatatggctgaatttagtgactatcaattaattctagatgaattaaagatgactttgtcacatgttgaagcggatgagttttcaacgtttgcatccaaaatactacatgctgaacatatatttgtagctggtaaaggacgttcaggattcgtggcgaatagttttgcaatgcgcttaaatcagctcggcaaacaggcacatgttgttggagaatcaacgacacctgcgattaagtcgaatgatgtatttgtaattatctctggttcaggttccacggaacatttaagattattagcagacaaagcaaaatcagtaggtgctgacatcgtattaattactacaaataaagattctgcaataggcaatctagctgggacgaacatcgttttgcctgcaggtacaaaatatgatgaacaaggctcggcacaaccattaggaagtttgtttgaacaagcatctcaattatttttagatagtgttgtaatgggattgatgactgaaatgaatgttacggaacaaacgatgcaacaaaatcatgctaatttagaataaaataaagatagtcgataatatgatgcctaggcagaaatattatcgattatttttttatttaaataataaattatagtataatatcaataataaacgaataggggtgttaatattgaagtttgacaattatatttttgattttgatggtacgttggcagacacgaaaaaatgtggtgaagtagcaacacaaagtgcatttaaagcatgtggcttaacggaaccatcatctaaagaaataacgcattatatgggaatacctattgaagaatcatttttaaaattagcagaccgaccattagatgaagcagcattagcaaagttaatcgatacatttagacatacatatcaatctattgaaaaggactatatttatgaatttgcgggtataactgaagccattacaagtttgtataaccaagggaaaaaacttttcgtggtgtctagtaagaagagtgatgtattagaaagaaatttatcggctattggattaaatcacttgattaccgaagctgttggatccgatcaagtaagtgcatataaaccaaatcctgaaggcatacacacaattgtgcaacgctacaatttaaatagccaacaaacggtttatattggtgattcaacatttgatgttgagatggcgcaacatgctggtgtaccatctgcagcagtaacatggggagcacatgatgcaaggtcattacttcattcaaatccggattttataatcaatgatccatcagaaattaatacagtattataaaatttgttaaaacagagaataccatggttaaaatgcatattcataaatattagattatacatagaaatatttcgctttagattaggaatttaaaataaatatttattaaacattatgaatttttaaagagtaatgtctgactcgttgatcatttatttttgtaaaaataaattaaagtaatgacaaagttattgaagtaaattgagtataaacatttaaatacgatgtcgaaaatggcgatagcatatgacttacatgaagttgtgtgctatcgctatttttagttataattccaaaaagttaatcgttcgatgatttaagaattattattgtttaattcaaatgtatgagggtataaaatcattgaatttaattcgataaagcgaaatttttgaacaaacatacttttgtatttatataaaagttttaattcttataaatttgacaaaactaattaactccgtataattatgaaacatacaagagggagtgtatgaattcatggattttaataaagagaatattaacatggtggatgcaaagaaagctaaaaaaaccgttgttgcaaccggtatcggtaatgcaatggaatggttcgattttggtgtctatgcatatacaactgcgtacattggagcgaacttcttctctccagtagagaatgcagacattcgacaaatgttgactttcgcagcattagccattgcgtttttattaagaccaattggtggtgtcgtatttggtattattggtgacaaatatggacgtaaagttgtattaacatctacaattattttaatggcattttcaacattaaccattggattattgccaagctatgatcaaattggactttgggcaccaatactattattgcttgcaagagtactacaagggttttcaacaggtggagagtatgcgggggcaatgacatatgttgccgaatcatctccagataagcgtcgtaactcattaggtagtggactagaaattgggacattatcaggttacatagctgcttcaattatgattgctgtattaacattctttttaacagatgaacaaatggcatcatttggttggagaatcccattcttactcggtttattcctaggattattcggcttatatttacgtcgtaagctggaagaatcaccagttttcgaaaatgatgttgcaacacaaccagaaagagataacattaactttttacaaatcatcagattttattacatagatatatttgtatgttttgtagctgttgtattcttcaatgttacaaactatatggtaactgcatatttaccaacctatttagaacaagttattaaattagatgcaacgacaacaagtgtattaattacttgtgtcatggcaataatgattccattagcattaatgtttggtaagttagcggataaaataggtgaaaagaaagtatttctaattggtactggtgggctaacattattcagtatcatcgcatttatgttattacattcacaatcatttgttgtaatagtaatcggtatatttatattaggatttttcttatcaacttacgaagcgacaatgccagggtcgttaccaacgatgttttacagtcatataagatatcgaactttatcagtaacatttaatatctctgtttcgatatttggtggtacgacgccattagttgcaacatggttagttacgaaaactggagatccattagcacctgcgtattatttaacagcaatcagtgttattggctttttagttattacattcttacatttaagtacagcaggaaaatctctaaaaggttcgtatccaaatgtagataacgagcaagatagagcttattatgcagaacatccaaaagaagcattatggtgggttaaagaacgtaagaattagagattttaataaaaagtataaatcaatcgtatataagcactttaaagctagtaggttctgctaactttaaagtgctttttaaattgagaactgtaattagccgtaataaagtttttgtatatacataaacccccactgcaatgattatcgcaatgggggaaagaggggacttaaagcatatgtttagctttgaatacttaaaattctcttgctattgaaatgttaggatgtaaatatgtcttagagtattttgtccaacgcaattaatattgagactctaaccttcaatattattatagagaacacaaacttaaatagattgggtgacttatttgtgtcagttattgcgattgcgataacttcttttctctatatacatatagtaacgtcttatctaataaaaaacatggtactacagtatcaaatttatctagggcttaagtttgatttttataataggcaggtttacctgataaaaatacttattcattatataatgttaacaatatgtattttaaagtttacattgagtgagggatattgatgaacgtaattttagaacagttgaaaacacatactcaaaataaacctaatgacatagcattacatatcgatgatgaaacaattacatatagtcaactaaatgcccgcatcactagcgcagttgaatctttgcagaaatattcacttaaccctgtcgttgctattaatatgaaatcaccggtgcaaagtattatttgttatttagctttgcatcgtttacataaagtgcctatgatgatggaaggtaaatggcaaagtactatacatcgtcaattgattgaaaaatatggtattaaagatgtaattggagatacaggtctcatgcagaatatagactcaccgatgtttattgattcaacgcaattacagcactaccccaatttattacatattggttttacttcagggacaactggactgccaaaagcatattatcgtgatgaagattcatggttggcttcttttgaagttaatgaaatgttgatgttaaaaaatgaaaatgcaatagcagcccctggaccactatcgcactcgttaacattatatgcgttattgtttgctttaagttccggtcgtacttttataggacagaccacttttcatcctgaaaagttacttaatcaatgtcataaaatatcatcatacaaagttgctatgtttcttgttccaacgatgattaaatcattattgttagtttacaacaatgaacatacaatccaatcattttttagcagtggagataagctgcattcttctatttttaaaaagataaaaaatcaagcaaatgacataaatttgattgaattttttggtacatcggaaaccagttttatcagctataacttgaatcagcaagcaccagttgaatcagtaggtgtgctatttccaaatgtggaattgaaaacaacgaatcacgatcacaatggtataggaactatttgtataaaaagtaatatgatgtttagtggctatgtaagtgaacaatgtataaataatgatgaatggtttgttactaatgataatggctatgtaaaagagcagtatttatatttaacgggacgtcaacaggatatgttaattattggtggtcaaaatatatatccagcacatgttgaacgccttttaacgcaatcttcgagcattgatgaagcaattatcatcggtattccaaatgagcgttttggtcaaataggcgtattgctttattctggtgatgtgacacttacacataaaaatgtaaaacaatttttaaaaaagaaagtgaaacgctatgaaattccatcgatgattcatcatgtagaaaagatgtattacactgcaagtggtaaaattgctagagaaaaaatgatgtcgatgtatttgagaggtgaattataatatgaatcaagcagtcatagttgcagctaaacgaactgcatttgggaaatatggtggcactttaaaacatttagagccagaacaattgcttaaacctttattccaacattttaaagagaagtatctagaggtaatatctaaaatagatgatgtagttttaggtaatgttgttgggaatggtggcaatattgcaagaaaagcattgcttgaagcggggcttaaagattcaatacctggcgtcacaatcgatcggcaatgtgggtctggacttgaaagtgttcaatatgcatgtcgcatgatccaagccggagctggcaaggtatatattgcaggtggtgttgaaagtacaagtcgagcaccttggaaaatcaaacgaccgcattctgtgtacgaaacagcattacctgagttttatgagcgtgcatcatttgcacctgaaatgagcgacccatcaatgattcaaggtgctgaaaatgtggccaagatgtatgatgtttcaagagaattacaagatgaatttgcttatcgaagtcatcaattgacagcggaaaatgtaaagaatggaaatatttctcaggaaatattacctataaccgttaaaggagaaatattcaacactgatgaaagtctaaaatcacatattccgaaagataactttggccgatttaagcccgtgatcaaaggtgggaccgttaccgctgcgaatagttgtatgaaaaatgatggtgcagttttattgcttattatggaaaaagatatggcatacgaattaggtttcgagcatggtttattatttaaagatggtgttacggtaggtgttgattctaattttcctggcattggtccagtaccagccatttccaacttactaaaaagaaatcaattaacgatagaaaatattgaagtcattgaaattaacgaagcgttcagtgcacaggtagttgcctgccaacaagctttaaatatttcaaatacgcaattaaatatatggggtggtgcattagcatcaggtcatccatacggtgcaagcggtgcccaattagtgactcgattattttatatgtttgacaaagagactatgattgcatctatggggatagggggaggtctaggaaatgcagcattatttactcgattctaaccagcgattaaatgtgtcattttctaaggatagtgtggctgcatattatcagtgttttaaccaaccttatagaaaagaagtaccaccattaatgtgtgcgtcattatggccaaaatttgatttatttaaaaaatatgcaaatagcgaactgattttaacaaaatcagcaattaatcaaactcaaaagatagaagtagacacaatatatgtagggcatttagaagatattgaatgccgacagactcgcaatatcacacgttatacaatggctttaacattaactaaaaatgatcaacatgtcataacggttacacaaacttttattaaggcgatgaagtagagatgaagtttaatgagatatggataaatgaatatttggcgctcgtaaatgatgataatccaatacataatgagattgtgccaggacaattagtgagtcaaatgatgctgatggctatgtcattagagacaaaccagtgtcaaattaactacgttaaacctattttaataaatgaaaatatcgaattcattgaacaacacgaacacgaaattatagcaattaatgacgatggagagattaaaataaaaatttctttgagcacaaaaaaataaccgatattagctgcatgaacgcatattaattaggagatgaaaggacagctaatatcagttatgtattgttattattattgggaacagagatgaatataggttacgtttctttctttgcacggggatgcattaatctaaaataataataacaactatatcaatgtttaataaattctggattattggaacgattagtcaatttaactaactttcatatgatctatatcgtcttgtaataaagagagcaatttgaatatttcagtatcactaaatgaatcgtcacatttaattgaaacatgctgaaacgttttggttataatttcataaactggtgcgccttcatggtgatactgtcgataaataatcataacctatattacctcctttgctactctatggttatattataaataacatttttatgtgtgacatcaaccttaagtatcaactttttatcagacatagaacgtatgatttactaagactatttatgtataaaagttctaaataaatatatatttatagagtcgcctggcagtcatttgggaaatataacatatatgattagagaggcatctatcgcaaaagaatgataatgatagaggtattgagcatatagatgagtttaagttcatcttgaaaataaagggttatttagtcatagatgtagatgtataggaaatatttgtatgtattgttcgatatgtatgaaattttcaataaaagctaataacgcttatatgtaactttcaaatttaaattatatacagagcatgatgattataaaaaaataaccacatcacataaattgagttcatacccaatttaagtggtgtggctaataatgttgatttatagatgaaccgcctaatcgttaaacctctgttacttcaacatcgatatgttcaatacggttgtatgcaccgtgatccacaggaccaacaaaatcattcattttccaaccgtttttaatagcagaagcgacgaaagctttcgcgctaatcacagcttctttcggtgacttaccgttagctaaatatgcagttgttgccgcagcaaatgtacaaccagcaccatggttataactttgttggaacatgtctgttgttagttgataaaatgtttgaccatcatagtataagtcatacgatttatcttgatctaaagctttgccacctttaatgatgacatgctgtgcgcctttatcaaagataattgttgcagcctttttcatatcttcaattgaatttaatttacctaatcctgataattgacccgcttcaaataagtttggtgtcactaccgttgctttaggtagtaaatatttaatcatcgcctcagtatttccaggattaagcacttcatcttcgcctttacaaaccatgacaggatctactacaaaatattgtgcattagatgcctcatatacttctccagcacgtttgattatctcctcagtacctaacatacctgttttaatagcatcaggtccgattgataaagccgtttcaagttgcttttcaaatacgtccataggtaatggtgtgacatcgtgtgaccatgtatctttatccatagtaacgatggcagttaaagcgaccatgccatacgtatctaattcttggaacgttttcaaatctgcttgcatacctgcgccagcacttgtgtcagaaccggcaattgttaaaactttctttaaagccattgagcttcactcctacataataatattgtattcatcatatcatttttaacctaattgaaaaatattaagcattcaatatttgatgattgttgaaatgaatcattcatactattgtaacttttgaaaatgtcattcactttagataagtgtgatatgttaaaatatgtcctgaggtgagattgaatggaatggtcgcaaatttttcatgacataacaacgaaacatgactttaaagctatgcatgattttttagaaaaagaatattcgactgcaatcgtataccctgatagggaaaatatatatcaagcgtttgatttaacaccgtttgaaaatatcaaagttgttatattaggacaagacccgtatcatggtccaaaccaagcacatggattagcattttcagtgcaacctaacgcaaaattccctccatctttacgtaatatgtataaagaattagcagatgatattggatgcgttagacaaacaccgcatttacaagattgggcaagagaaggcgtcttgttattgaatacagttttaaccgtaagacagggtgaagcaaattctcatcgtgatattggttgggaaacatttactgatgaaattattaaagcagtgtctgattataaagaacatgttgtctttattttgtgggggaaacctgcacagcaaaaaataaagcttatcgatacatctaaacattgtattataaaatcagtgcatcctagtccactgtctgcatatagaggattctttggatcaaaaccgtattccaaagcgaatgcctatttagagtcagtaggaaaattaccaattaattggtgtgaaagtgaggcgtagatgttgaatagagaaactttaatagcacgaattgagcaagaattagtacaagcagagcaggcacagcatgaccatgactttgaaaaacatatgtatgccatacatatattaacatctttatatgcttcaacatcaaatacaccacatattggtgaacaacaaatgaatcgtcgtattgctaaccataatcaaatgccacaatcacaaataacgcagccaactcatcaagtgacagctgctgaaattgaagcgatgggtggtaaagtaaatacgcattcagcacatcatcataataagtcatattcacaaccttcaaaccaacaacaaagattagcgacagatgatgacattggcaatggtgaatccatatttgatttttaaaaagcaacaatgaaacataattacttaatagcttgttaagtatgtaggttaataatcaagacgcatatacttttattcgagtgttcggatttaaacatttattaatactgaattatataaggagaggtagcaatgaaattatttattattttaggtgcattaaacgcgatgatggctgtcggaacaggtgcatttggtgcgcatggtttacaaggaaaaataagtgatcactatttatcagtatgggaaaaagcaacgacgtatcaaatgtaccatggcttagcattattaattataggtgtaattagtggtacaacttcaatcaatgttaactgggctggctggttaatatttgctggtattattttctttagtggatcattatatattttagtattaactcaaattaaagttttaggtgcgattacgccaattggtggcgtattgttcatcattggatggataatgttaatcattgcgacattcaaatttgctggttaaattttaaaactttagattacctatgtaactaaacattaaatttttaataaaaataatcaagaaaaagagttacaaactcatcttttgggtatagaataccttcgaggtgagtttttatttatggaaaaaaagaataagcaaatagatagaggcgatttaaaacaaaacctatctgaaaagtttgtatgggcgattgcatatggttcatgtatcggatggggcgcattcatcttaccaggagactggattaagcagtcaggtccgattgcagcatcaattggtatagttattggtacattattaatgatattaattgcggttagttatggcgcattagtagagagatttccagtatcagggggcgcgtttgcctttagtttcttaagtttcggcagatatgtgagtttcttctcatcatggtttttaacttttggttatgtctgtgtcgttgctttaaatgcgaccgcattcagtttactagttaaattcttattgccagatgtcttaaataatgggaaactatacaccattgcgggctgggacgtttatattacggaaatcattattgcgaccgtattactacttgtattcatgctagtaacgattcgtggcgcaagtgtatctggatcattacaatattatttctgtgtggcgatggtaatcgtcgtattattgatgttctttggttcattctttggtaataattttgcacttgaaaatttacaaccgttagctgaacctagcaaaggatggttagtgtctattgtggttattgtatccgtggcaccatgggcatatgttggatttgataatattccacaaacagcagaagagtttaactttgcaccaaacaagacatttaagcttatcgtgtacagtttattagcagcatcattaacttatgttgtcatgattttatacactggttggttatcaacaagtcatcaaagtttaaatgggcagttgtggttaacaggtgctgttacacaaacagcatttggttatattggattaggtgtattagcaattgcaattatgatgggtatatttactggtttaaatggattcttgatgagttcaagtcgcttgttattttctatgggacgttcaggtattatgccaacaatgtttagtaaattacatagtaaatacaaaacaccatatgtcgcaatcatattcctagtaggtgtgtcgttaattgcaccttggctaggaagaactgcattgacttggattgtagatatgtcatctacaggtgtatccattgcctactttattacatgtttgtctgcagcgaaattattcagttataacaaacaaagtaatacgtatgcaccggtttacaaaacgtttgctattatcggctcatttgtatcattcattttcttagcgttgttattagtgccaggttctcctgcagcactgactgcaccgtcttatattgcattacttggatggttaatcatcggtttaatattctttgtgattcgatatcctaaattgaaaaatatggataatgatgaattaagtcgcttgattttaaatagaagtgaaaatgaagttgatgatatgattgaagaacctgaaaaagaaaaaactaaataataaaagaatcgcacaatataccttcttcattcggaggcgtatcgtgcgattttttgtattataaattgacatttaagacgaggcagctgaaccttatatataattgctaatagtttgggctgagccaattctaacaatatttataatcgtttaaaagatttcacgaacccagaaacaattaatttagaaatttggtcggcgaataataaacctaatgcgatggctcctgcaataagtgttacttctaacattgtatttattgctgtgctgaaatttaataagactaaattttttgtagcatcgtatgctaagccaccaggtactaatggaatgatacccgttaccataaaaatgatggcaggttctttttgtttacgagccatataatgacttaacaagcctaatgctaaactaccaaagaaactagagtatatagtgtgcacattaaagccgttgaagaataaggtgtaaaccatccatccacatgtaccaacgaaaccacatgatagatataattttctaggtgcatcaaaaatgacgcagaagaacattgaagctaaaaagctaaagataaagtttaagatccaaaacatagtctgatactcctatactaaaattaatacgctaccaacgccagcaccgatgccaaacgcagtaaccaatgcttctaatgatttcgttgtgaacatcaacatgtgtccaccaaataaatcttgtattgcgtttgttattaatacaccaggaacaataggcatgactgctgcaatgataatagttgccaagtcacctgttgggataagtgtatgtccaataacggcgataatcccaataactaatgaaccaatgaattctgggataaactgtgcatgtaacttgcgatctaaaatctcagtgactaggtatcctagactacctgctaatatcgcagttaaaacatcaatcaatctaccaccttgtaaatataagaaactcattgcaatcattgctgcagcaaaacctttaaagggaagactgctgtcacgcttagcaacatatattttttcaagttgcgtttttgcttcggctaaagaaatttcattgtttgtaatttgacgcgaaattttattagcttgcgaaatttttattaagtttgtatctcgagaggtaattctaaatattctaggaaacgattccgaatgtaacgtaaactggatgacagtgtttgtaacaaagctgttactttcactgtaaccaagtttttttgcaatacgtgtcatggtatcttctacacgcgtaccttctgcaccagattctaatagtatgcgagcagcaagcatgacaacgtctttgataagtacctcttgtttgtattcttctgaatttatgtccatttcatcaccattgtttataagaatttaatactcattatagtttatacactataaaataaccacatgagctttttgataagttgttattgattttaaaaaactaatatttgatactattgtaataataatcatcggaatttttagtagttaaaattctcttgaagtataaaaaggaaaaattattgaaaaaaattcgacaaaaatatgtttcaaatatttcaaataggttaaaataatattagttaaccattacaaaaattgtatagagtagcgactgtataatttctattgaggttaacgtttatatgtagtgatagtagttaaagttctcccaaggaagactactcgggtacactttgctatgagcaaagtgtactttgttattgataatacattagcacatatatataagtttaaacatacagatttcaactatttaccaaatcacgtcttatgtatacgggaatatactgaagataaacgaaaaattccaagcttaaaccgataagcttggaatttttttattaatttataaacgtaccaatgtattaagaaatcgcaaagaattgatcgaattcgtttgtgttaataagatgtcctacaaagaaactaccgaattcaccgtatcgtgctgttgtttcatcaaagcgcatttcgtatacaatttttttgaattgtaatacgtcatctgagaacaatgttacgccccattcgaaatcatcaaaccctacagaaccagtaataaattgtttgattttgccagcatattttctaccaatcataccatggtcatacattaatttttggcgttcttccatagttaacatgtaccagttataagtttcattacgacgtttgttcattggatagaaacaaatataatcagaatgtggtaattctgggtataatcttgctttgatatgagggttctcataaggatcttcatcagatttaccagctaaataattgctcaattcaatgactgatacatatgaatatgtagggattaagaagtcagcaatgcgcaatttgttaaattcattttcaatatgatttaaagacttcatttcaggacgtaagaaccataataacaaatctgctttttgaccagttatattataaatagcttgatcaccagattttgatgatcttacagttgctgtattttctaaaaatgattgaaattcagtgacaagtgcatcgcgttcgtcctttggaactagacgtaatgatgcccaatcaactgcataaaataaatgtagactataccaaccatctaatgtttcggctgcttgactcatgtttatcgctccttttcaaaaatcatcagttctttataaattttatcataaagcaaaggggtaacgataaaattatgattacaaattggtgacgtggcattatgaaataaaatggcgtataattataccgtgaatgattaataagatttatattacaggaggacattatggctgatttattaaatgtattaaaagacaaactttctggtaaaaacgttaaaatcgtattacctgaaggagaggacgaacgtgttctaacagctgcaacacaattacaagcaacagattatgttacaccaatcgtgttaggtgatgagactaaggttcaatctttagcgcaaaaacttgatcttgatatttctaatattgaattaattaatcctgcgacaagtgaattgaaagctgaattagttcaatcatttgttgaacgacgtaaaggtaaagcgactgaagaacaagcacaagaattattaaacaatgtgaactacttcggtacaatgcttgtttatgctggtaaagcagatggtttagttagtggtgcagcacattcaacaggagacactgtgcgtccagctttacaaatcatcaaaacgaaaccaggtgtatcaagaacatcaggtatcttctttatgattaaaggtgatgtacaatacatctttggtgattgtgcaatcaatccagaacttgattcacaaggacttgcagaaattgcagtagaaagtgcaaaatcagcattaagctttggcatggatccaaaagttgcaatgttaagcttttcaacaaaagggtctgctaaatcagacgacgtgacaaaagttcaagaagctgtcaaattagcacaacaaaaagctgaagaagaaaaattagaagcaatcattgatggcgaattccaatttgatgctgcgattgtaccaggtgttgctgagaaaaaagcgccaggtgctaaattacaaggtgatgcaaatgtctttgtattcccaagtttagaagctggtaatattggttacaaaattgcacaacgtttaggtggatatgatgcagttggtccagtattacaaggtttaaattctccagtaaatgacttgtcacgtggctgctcaattgaagatgtatacaatctttcaattatcacagcagcgcaagccttacaataacgatggatttagcgagtaaatattttaatggcgtcaactggcgatatatcgatcattcttctggattagaacctatgcaatctttcgcattcgatgatacattttgcgaaagtgtgggcaaagatatatcagataatgttgtgcgtacttggattcatcaacatactgttattcttggtattcatgattcaagattgccgtttttaaaagatggcattgattatttaacgaatgagattggttataatgccattgttagaaactctggtggcttaggtgtcgttctagatcaaggtgtattaaatatatcgctgatgttcaaaggacaaacagaaacaacgattgatgaagcgtttactgtgatgtacctcttaattagcaaaatgttcgaaaatgagaatgttgatattgatacgatggaaattgaacattcttattgcccaggaaaatttgacttaagtatcgatggtaagaaatttgcaggcatatcgcaacgaagagttagaggcggtattgctgtacaaatttatctttgtgttgaaggctctggttcagaacgtgcattgatgatgcaaacattttatgaacatgctttaaaaggtgaagtgactaaatttaaatatcctgaaattgaaccatcttgtatggcctcattagagacattgcttaacaaaacgattactgttcaagatgtaatgtttttactattatatgcaatcaaagatcttggcggtgtattaaatatgacgccaattactcaagaagaatggcaaagatacgatacgtattttgataaaatgattgaaagaaacaagaaaatgatagatcaaatgcaatagttaaatatttaacagcccctttcaagttatcgtttggggctgttatttttgaaagtatccataaaaagcataaatatgttattgacctaatatttaaattgaacatcattaaattaaaagtaatgatatgatggaaataataaatttaataagaaaatttcatgttttacgtattaaatagattgagaatagggtatatataatgcgtatgactatgaaagaaacgaccttctattgaaatgttctaatactttagtagtaaatctatatattccaattattatttgtagtattatagttagggtggaaaattataaattgtagggctattttataaaaagataaagaatctgaaatatcactcgataagatttaaactttgaagtaaacgaaagttagttttatactaatcaagttaagtcaaatataaattcaaaataaagattatacataatatgaataatgtgagataaagactgcaatgaaatttaacgcgaatgcgtatgcaacttagaatatgatgtcttttactaataaataaaaataatgaatcaagtataggataaatataaaaggtgatattgacatgacaagaaaaggatatggggaatcgacaggtaagattattttaataggagaacatgctgttacatttggagagcctgctattgcagtaccgtttaacgcaggtaaaatcaaagttttaatagaagccttagagagcgggaactattcgtctattaaaagcgatgtttacgatggtatgttatatgatgcgcctgaccatcttaagtctttggtgaaccgttttgtagaattaaataatattacagagccgctagcagtaacgatccaaacgaatttaccaccatcacgtggattaggatcgagtgcagctgtcgcggttgcttttgttcgtgcaagttatgattttttagggaaatcattaacgaaagaagaactcattgaaaaggctaattgggcagagcaaattgcacatggtaaaccaagtggtattgatacgcaaacgattgtatcaggcaaaccagtttggttccaaaaaggtcatgctgaaacgttgaaaacgttaagtttagacggctatatggttgttatagatactggtgtgaaaggttcaacaagacaagcagtagaagatgttcataaactttgtgaggaccctcagtacatgtcacatgtaaaacatatcggtaagttagttttacgtgcgagtgatgtgattgaacatcataactttgaagccttagcggatatttttaatgaatgtcatgcggatttaaaggcgttgacagttagtcatgataaaatagaacaattaatgaaaattggtaaagaaaatggtgcgattgctggaaaacttactggcgctggtcgtggtggaagtatgttattgcttgccaaagatttaccaacagcgaaaaatattgtaaaagctgtagaaaaagctggtgcagcacatacttggattgagaatttaggaggttaatgcgttgattaaaagtggcaaagcacgtgcacatacgaatattgcacttataaaatattggggtaaaaaagatgaagcactaatcattccaatgaataatagcatatctgttacattagaaaaattttacactgaaacgaaagtcacttttaacgaccagttaacacaggatcaattttggttgaatggtgaaaaggttagtggcaaagaattagagaaaatttcaaaatatatggatattgtcagaaatagagctggcatcgattggtatgcagaaattgaaagcgacaattttgtaccaacagcagcagggttggcttcatcggcaagcgcatatgcagctttagcagcagcttgtaatcaagcgctagacatgcagctgtcagataaggatttatcgagattggcgcgaattggttcgggttctgcgtcgcgtagtatttatggtggatttgcagaatgggaaaaagggtatagtgatgagacgtcatatgccgttccacttgaatcgaatcattttgaagatgaccttgccatgatatttgttgtgattaatcaacattctaaaaaggtacctagtcgatatggtatgtcattgacacgaaacacatcaaggttttatcaatattggttagatcatattgatgaagatttagctgaagcaaaagcagcgattcaagacaaagattttaaacgccttggtgaagtaattgaagaaaatggtttgcgtatgcatgccacgaatctaggatcaacaccgccgttcacatatcttgtgcaagaaagttatgatgtcatggcgcttgttcacgaatgccgagaagcggggtatccgtgttattttacaatggatgcgggacctaatgtgaaaatacttgtagaaaagaaaaacaagcaacagattatagataaattattaacacagtttgataataaccaaattattgatagtgacattattgccacaggaattgaaataattgagtaaggaagagataaaatgattcaggtcaaagcacccggaaaactttatattgctggagaatatgctgtaacagaaccaggatataaatctgtacttattgcgttagatcgttttgtaactgctactattgaagaagcagaccaatataaaggtaccattcattcaaaagcattacatcataacccagttacatttagtagagatgaagatagtattgtcatttcagatccacatgcagcaaaacaattaaattatgtggtcacagctattgaaatatttgaacaatacgcgaaaagttgcgatatagcgatgaagcattttcatctgactattgatagtaatttagatgattcaaatggtcataaatatggattaggttcaagtgcagcagtacttgtgtcagttataaaagtattaaatgaattttatgatatgaagttatctaatttatacatttataaactagcagtgattgcaaatatgaagttacaaagtttaagttcatgcggagatattgctgtgagtgtatatagtggatggttagcgtatagtacttttgatcatgaatgggttaagcatcaaattgaagatactacggttgaagaagttttaatcaaaaactggcctggattgcacatcgaaccattgcaagcacctgaaaatatggaagtacttatcggttggactggctcaccggcgtcatcaccacactttgttagcgaagtgaaacgtttgaaatcagatccttcattttacggtgacttcttagaagattcacatcattgtgttgaaaaacttattcatgcttttaaaacaaataacattaaaggtgtgcaaaagatggtgcgtcagaatcgtacaattattcaacgtatggataaagaagctacagttgatatagaaactgaaaagctaaaatatttgtgtgatattgctgaaaagtatcacggcgcatctaaaacatcaggcgctggtggtggagactgtggtattacaattatcaataaagatgtagataaagaaaaaatttatgatgaatggacaaaacatggtattaaaccattaaaatttaatatttatcatgggcaataaatgatttgataggggagcaatcatctaatttaattagaagataaatgctccattttttattgccagccgtgttacgtatcttgaaaaaaatattaaaaagagtaaaatagatagagttaacgaaaaaattaatgaaatcgacgatatagatatgataaagaaaggtgggtagcaatatgaaaaatacattccttatttgtgatgaatgtcaggcagtcaatataagaacgttacaaaagaagttggaaaaattagatcccgatgctgaaatcgtgataggttgtcaatcttattgtggacctggacgccgaaaaacattcacttttgttaataaccgcccactggctgcgcttactgaagaagaattaatcgaaaaagtttctcaacaattaaagaaaccacgtgatcctgaagaagaagagcgtttaagaaaacgacatgaagaacgtaaacgtcgtaaagaagaacaagatagaaagcttaaagaaaaattagaaaagcgaaaagcacaacaataaagcctgatggcagcatcattcaatgcgtgccaccaggtttttatgttttgtctagaaattaaataaatcattaaatgattcggccatcgtaggatgcgtataaatattatctcgtaatacggtatatggaatgttttgatcaatcgcaagtttaattatattaattaattcttcagattgcttaccatataatgtagcacctaaaatcatattattttcattattaatgactactttaaataaacctcttggatcattgttaattttgtgacgaggtatagcacttactaaaagttgatgttcagtgtaatcataatgttgagcggcagcttctttactagttaatccaacacgtgataatggtggatctataaatactgtataaggcacgccacctctattgtcagtcgtacgtgactgattaccatataacgctgatttgataattcgataatcgtctaaagatatatacgtaaattgaagtccgcctttaacatcacctgcagcataaatatgcggtacagttgtttgaagatgagcattgactttaatttcgcctctgtcgcctaattcgatatcagtattttctaaagctaaatccgtattcggtttgcgcccgatagccaaaagtactgcatcagcctcaaagttaccaacgttggtatggactgttgtatgatgattgtcagatgacaattcagtcgtttcaacatttgtatgcaatgtaatgcctttattttctaagtcagtaatagcatgtgcaacgacatcttgatcttcacgtggcataaatgattcaccacgttctaatactgtaaccttactacctaaattcgcaaacattgaagcaaattctaaggcgatataaccgccacctacaataacgaggtgcttaggttgatagttaatgtttaataaacctgttgaatcgaagacgtgtttagcttgatcaaggcctttaatgttaggaataacagaggtagcaccagtattaataatgatatgaggtgcagtaatactatcggcgatatcgtcatgctgatctaataaattcacttcagtattagatttaaactgcgctttaaaatccagtacatcaatgttgttatcgtctgctaataaatggtaatttttattgtttagcgcattgacaacatcgtttttacggttataacttgcttcaaaagatttgccttctaatccatcatgtacaagtgtctttgaagcaatacatcctatgtttatacaagtgcctccatacattttcggagattgttcgataactgcgacgtgttgacctgttgatgcagcatatttggctaaagttttaccagcttccccaaatcctattacaattaaatcatatgttttcatgacataaatcctccttttgaatgtcttcaatgacatctttgattgtttttcctttataaaaattaataatgatattctgttcgtcttgctcataatgtgacatagtagttgcaatattacgagcaatttgacagtgactgccttcgtcgccagtaaatagtcgtgtgtgatgttctttctctaagacaaaatgtttatataatgttgctagagagacatcagcgctacgatcatttgataaataaccaccatctttaccccgtattgtgttaatcatttttaaatcgacaagttgagtcgtcacgcgtcgtaattgaacaggatttaaacaagttaattctgctaatgaactactattgaatttttctgaatgatgcttagttaaaaaagctaatacatgcacggcaatgttaaattctaaattcaatgtttctcacctcataattgtaactatattagttacaattaaaaatcattttgctcaatgtgtcaatacttatgtttgagaactattgaattaggtgtgtttattgtgatgatttattgtttgaaagttgttgcattaacggtgagattgcacaattgaaattttagttatgtatgaactgatagatatgaaatgaatattgaaaataagggcaataaaattttgaatgatgatgttgtgtgattgtataaacttattcgtattttagatacgttttgatatttcgcatgatgaggaaatattttcaacaactggtgacatatttaaatcgtaaatatattttgagatattaatatatattagattaaggatgttgtcgcaataaaattaaaatattgaaagataatttttattgattaattgcgaatatacaaagacaccattatatccatatgctaaaataagaaaaaaggcgacatgttatctcaatttacctgcatctagactcctttacataagaaataatcatcgccgagttttaaaattttacaactttgtagatgtaaaaagcatttgattttaaatagtttgaaaatcatatatttttgaaaaaggagcatgccgatgagtattgacatgtatttagacagatctcgaaaccaagcttcaagtgtggggaatttgagtcaaacaatgaattcaaattatgatgcgttggaaaaagcaattactcaatttatcaatgatgatgtgcttaaagggaaagcgtatacgtcagctaagcaattttttagtacggtgttaattccattatcaacaagtatgaaaacattgagtgatttaacgaagcaagcttgcgataattttgtgtcacgttatacgagtgaggttgatagcatatctttaaaagaatcagagcttgaagaagatatcagatcattaagtcaacaaattacgcgatatgaaaatttgaataacaatttgaaaaagcatgcttccgataatcagcaagccatttcatcgaaccaacaaataatacaaacattaggtcaacaaaaacatgaattagaagagaagctacgcaaattgcgtgagtttaatcaaaaatcaccagaaatatttaaagaagttgaagaatttcaaaaaattgtccaacaaggacttacccaagcgcaaaatttttggaacttttcaacaaatcaatttaatattccttcaggtaaagaacttgattgggccaaagcaagtcatgaaaaatatttgaaagttgctatggggaaaattgaacataaagcagagaaagaaactttaaataaagcagactttgctgttataaaggcatatgccaaagaacatccagaagacgatatcccgaaaagtatattgaaatatataaatgacaataaagacagtattaaaagagatataggattagatattacgtcaacacttttagagcaaggcggtataaatgcaagtaaattcggtgtatttatcaatacagcaggtggagtgaaaggcccagcaggtccaaattcatttgtggaagtcaaacgtacatcaggtaatgtgtttatagaaaatggtagtaaatttgcaaaaggcggaaaatacctaggtaaaggtgttgctggtgtaggatttggtataggtatgtatgatgaccttgcaaatgatgataaaacatttggagaggcgttgtcgcataatggtatgacgcttgcagctggatctgcagggacagcagttggagctggattagcgacttttgttttaggaagtaatccagtaggatgggtgattttagcaggtttggctatgagtacagtatttgcattaggaacagatttaatttatcaaaataatatttttggattaaaagataaagtagactgggtagggcataaaatcgataatagtatagatgttgttaaaaaaactacagaaaaatccatggatagtgttgggaatgctgttagtgaagctaaaaatattattagcaatcatataaatccaatgaaatgggcgtggtgagttttgctttttaatgttaaggttattaataaaaatccgagatataaagtcgttcaatataatgatgagtatttgttaattgatttagtaagtacttggcttgtatacttttttccttttattaattggttcattcccaaaaggtatgcaaaacttagtgagaaggaacttgaaaatttaaatgttgataaacaaaataaaaataatattttctggccagttactggtagttcgtttttatttgtagttattttacggaaatatgtacatacgtttgaagttcaattagataataagattttaatatctttatgttttataggatttataggtattgcagcattttacatttacttaaataaaaagcttaaactaaagatatatgatgataatctagataatgaaaataaggttatattagtgcctacttttaaagatggaagttttatagttttcacatatctattattaggaggttgttctatattatttttaatatggctaatgactataaaacctcaaaatctactggtatttattatgtggattattattacaatttttttctttctaataagcatgggctcaattagtaataaaaaggtttatgccaaacttaaaaagcaatagtaattactaaacttagattgtagttcgtaagttaagtaataaacaggaaaatagtatgttactaaaatacaaaacacttataaagtatctgaaagtgtattagatataaaaccaacgagacggaagtggtaaattttgctttacgaatctaatattattaacaaaaatcccagatatagaattattaaatataaaaacgactatctgatgattgatttagtaagcacatggttagttttgttctttccgtttattaattggttaatcccaaaaaaatatgtccaaatcagcagagaagagtttgataatttaaatattgttaaaccagttaaaaataaagctttatggccagttataggtagcatacttttatttggcactatgtttagagataaaatatatatacctgattctcatttagaaaaaaattgcgttattatcatttgttcggttttattattaagtattctagtgttttatatatatttaaatcagaaagtaaagttatctatctataataatcggagtagcaatggaaaaattatgatttttccatcattcaagaatctttgctttgtactattttcttattttttctgtggtggattatcaatcatgttcttagatgttttgattagtttatctatccaaaatattatagtatttattgcttgggttattatgacaatgctatttttctttataaatatgtcttcaataatagacaaaaagattcatgttatatatttaaggtcatataaatattaattttgatacaaaagggcacaagtgttttgagaaacagaaacgataatatagctgtgtgaatttgttattaataggaagtgataattattgctttgtgaaaccgaaattatcaataaaaatccgaaatacagagttattaagtatgatgatgagtatttaatggtcgatgtaataagcacttggcttgtatacttttttccatttattaattggttcattccaaaaaggtgcgccaaaattagtagagaagagtatgaaaaactgaacactgttaagccagttaaaaataaaaatttttggcctgttgtaggaggaacaatcctactaggtgctacttccagaaagtacatacacttacttaatattcaattagaaaaaagatcggttatatttatatgcttcgttgtatttctatgtattttaatcttttttgtgcttctgaatcgaaaattaaaattgaaagttttcgataataaaaaagaagaacaaaaaataattttagtaccaacattaaaaaatgctgttcttatattatatggctatttgttgattggaggcatgtcaatattagctttaagcatgttgctgacattagaaaaccagaatttaataacttttatagcttggggtatggggttaatgttgtttttcttgatgaatataacactcattgtcaataaaacagtcaaagttataaaaaggtgaataaataactaattatattgtattggccgttcttcaaataaaaaataatttgaataaggtggaagtgataaacagtgctttgcgaatctagagtcattaatcaaaaccctaaatatagaattattaaatacaataatgaatatttcatggttgatttagtaagtacttggattgcttattttttgcccatgattaattggtttattcccaaaaagtacgcgaaaattagtagagaagaatttgaaagtttaaatattgtcaaacccgctaaaaataatactttctggcctgttgcaggatttgcagtgttattaacaaccttaacaagaaaatatatctatttgcttaacatccatttagaaaaagaaatagttatattaacatgctgtatgatacttctaggtgttttcgcattgtttatatatataaatacaaaattgaagttacatatttttgataaaaataaaagtaataacgaaaagatcatattaatacctacatttaaaaatatttgtttatccttatttgcttatatattatttggtggattgtcaacaatggctctgagtatgttagtaacttcatcccctcaaaatataatagaatttcttgctttaattggcatgactgcatgcttctttctactgaatatgtcatcggttctagataaaaaaattcatgttattttaaaaacaaataagtagtaaaattgattaacttaggtagtatcggatacttaaatgttggttcataaaaagcaatgattttaaatcgaggagctatcttagaacagggaaataaaacagccaaagttataaaaagtgaattaataactaattatattatgttagccacgcttcaaataaaaaataattagaataaggtgggattgataatcaatgctatgcgaatctaaaatcatcaataaaaaccccaaatatagaattattaaatataatgatgagtacttaatgatcgatataataagcacttggattagtttattttttccttttattaattggttcatccccaaaagatacgtcaaaattagtagagaagagtttgaaaatttaaatattgtgaaacctgctaaaaagaatgttttttggccagttgcaggtatctctactttattcgcagttacattaagaaagtatacacatttacttgacactcaacttgatagaaaattagttattgctatatgttgtatcacatttatagggattttaacattttatgtacgcctaattaaaaaatcatctttaaatatttataatactaaaaataaaaggtcaaaaattatcttaataccaacactaaaaaaatttttgtttaacattgtttagatatgctttttttattttatggacagtgattttctcatatgctctattatcaatgagttatcaaaacataatagtatattttgcttggattacagcaataatgggtttttttctagtgaatatagctttaattatagataaaaacattcatgtcatacttaaaaattaagtgaaagtactaaattcagattaaaaatatgaaaatatcagttaataaaacctttgatgacagtaacttgatagtatttgaatgtcttttgaagtatcgaaaaatgtattacacataaaattaaagggatgtggagacattgctttgcgaatctaaagttattaataaaaaccctaaatatcgaataatcaaatacgatagtgaatatttaatgattgatttggcaagtaattggattgtcttcttctttccatttattaactggctcataccgaaaacatatgtcaaaatcactaagaatgattatgaaaaattaaatattgtcaaaccagttaaaaataaatcgataggatggaccatattcgcgggtattgtgttacttggtggtactgtaagaagaaatacttatttatttgattttcaattagaagaactaattgtttggagcagctgtttcattgggtttttagagattatatttttttattgttatctaaataagaaattaacattaaatatttataatgaaagtaaaaataatgaacttaaattaagattattaccctcctttaaaaatatttgtttcacaattttttattacctatttactggtttcatgtcttatggggcattttacttgttggtatttgaaaatgtgcaaaatttaatcttatatgtttcttggcttttcatgactatgctatttatgtttatgaatatgcattcaattatagataaaaaagtacatatattcttaaagtctaataaatagttacaaatttagttagttttcaattgttaattaggggtggtaaacagtgctttgtgaatctagacaaatttataaaaatcctaaatatcgagttattagatataataatgaatatttcatggtcgatttagtaagtacttggattacttattttttcgctatgattaattggtttttgcccaaaaaatacgcaaaaattagcgaaaatgaatttgaaaggttaaatatagtcgagcctgttaaaaataatgttttttggccggttgcaggaagttcagttctatttggaattatattgagaaagtacggtaacttctttaatgttcagtttgaaaaacaactagcaatcactgtattttttatcatgttaatagggatgttaattttttatttttatctaaataaaaaattaacattaaaaatttttaataccaacgtggttaataagaatagagttgtattaataccgactttcaaacaaggattgttaatagtttttgcgtacttttttttaggaagcgcttcaatatttactttaaccattcttttgacgacagagtcacaaaatataataatatttttaacttgggttattatctcgatgtttttctttttagtgaatatggcttcgataggtaataaaaatgttcatgttattttaagaataaacgagtagtaaaaatgatcgaaattggtagtatcgcatatttaaacggtggttcaaaaaaatataatcatatcttaaatcaggaaaatagatagtaatgtttgaatataccaagtgaaaatgcccattgtgattgataaaggaaaaaactgttttaatttaaaaatgaaatatagagcgtgttattttgtatgatagctcttataacattggcgtttttaatccaatagtatggacggttttagctggttttgttgcggaatctgtttagacaattcttaaaaattggacttttcatactaataaatttggattaagagataaaactaattggataagacattaaatagacgctgtttaaaaataccacagaaaaagctgtagatagtgttggaacgatagttggtgaaggtacaaaaagtattggggatcatttaaaactaatgaaacgggagtggtaaatgttgctttgcgatgtcagagtcatttataaaaatccgaaatacaaagtcattcaacataacggtgaatacttattagtcgatttagtaagcacttggttcgtgtacttttttcctttcattaattggttcattccaaaaaagtacgcgataattagcgaagaagaatttgaaaatttaaatgttgttaaaccaaataaaaataatgttttctggtcagttataggaagttcggttttgtttggagttactttaaggaaatacatacatgtttttgatgttcaattagataagctagttgtaatgatattgtgtgctctcgctttaatttgtgttatagttttttattttaacttaaatagaaagcttaagttaaaagtgtttgatacaaatattgaaaaaaataagagagttatattaataccaacgtttaaacttggctgttttttagttttcggatatattttcgctggaagtttttcaatattttcattaattgcccttatgacaatcgaacctcaaaatataataatatttatttattggattatgatgacaatgcttttctttttgttaaatatgacttcgataggtaatgaaaaagttcgcgttataatgaaaaataattgattacatttaaaatattctaaatgttgtcgacacaatccttttaagacgctagtagaatttaaatgacttctaatgtatatgaaagtgtatcaatataaaaccaattgaaaagaagtggagacattgctttgtgaaactgaaaatattaataagaatcccaaatatagaattatcaaatacaaagatgaatatttgatgattgatttagtaagtacatggttagcactctttttcccaatgattaattggctgattccaaaaaagtacgtcaaaatcagcgaaaaagattttgaaactttaaacattgtgaagacagctaaaatcaattctttttggccagtggcaggaagtacggtcttatttggtgttatgttaagaaggtattcccatttatttatcgttaaatatgaatatagtatagtaattttaatttgttgcatcataatactaggtatttttctgttttttttatatttaaatcaaaagttaaagttacaaatctataatgaaaacaaaaataaaagcaataagataatcatatttcccactttaaagagtctttgtttatcaatagttttatatatttatttaggtggtggttcattctttactatttatatgttattgacgattgaagttcaaaatataatattatttataactttgtttgtaatatttttgtttttcttatttttaaatatgtgctcactatatgacaataaagttcatgtattatttaaatcaaatggaattgaaaagttttaataggaataataaacaaaggaatggtagtgataaatattgctatgtgaatctaaagttatcaacaaaaatcctaagtatagagttattaaatatggtgatgaatatttaatgattgatttagtaagtacctggttaactttatttcttcctatgattaattggttaattccaaaaaaatatgtcaaaatcagtaaaaaagaatttgacgatttaaacattgtcaaacctgttaaaaataaagctttttggccagttgcaggtagtactattttgttcggagttacgtttagaaaatatattccttcacttaatattcaattagagaaaaacatggtgattgtaatatgttgtgcaatatttctgggtgttttaatactttttttatttctgaatcgtaagctaaggttggaaatttataataataactctagtaaagggaaaataattttatttccttcattaaaaaacttttgtttcacaatattttattattttttatttggcggtctttcaataatggctctaagtatgttattaactttaaatcctcaaaatataataggctttattggttggttggtaatgactgcaggtttctttctgttaaacatgtcatcgattattgacaaaaaaatttatgtattatctaaaactaacacggtggaaaaatgatggtttagctggatttactgcaggttctatttcggcaatacttgtatattagaccaatcaaaaaaatgaatttggaataaaagataaaaacgattggataggacataaactagacgttggtatagatgctgtagaaaaatctgcagaaaaaacagtagatggtgttgaaaatgtcatggtgaagcttcaaaaagtatttctaatcatataagccctaagaaatggagctggtaaatgttgctatgcgaatctaaaatcatcaataaaaacccaaaatatagaattattaaatataatgatgaatacttaatggtcgatataataagcacttggattagtttattttttccttttattaattggttcatcccaaaagaatacgtcaaaattagtagagaagagtttgaaaacttaaatattgttaaacctgctaaaaagaatgttttttggccagttgcaggtagctctgctttgctgggagttgcattaagaaaatatacacatttacttgacattcaacttgataaaaaattagttattgccatatgttgcatcacatttatagggattttaatattttatgtacgcctaattaaaaaatcatctttaaatatttataatactaaaaataaaaggtcaaaaatttttttaatacctacactaaaaaatgtttgtttcacattatttggatatattttatttggcggattgactatgctattcctagatgcactattatcaatgagttatcaaaacataatagtatattttgtttggattgcagttataatgggtttttttctagttaatatagctttaattatagataaaaacattcatgtcatacttaaaaaccaatagaaattaccaaattaaatttgcaatggctttaatattgtcgttcttaaatgtttttcaatttctgattcaaaagtacatgtaatttaaaggtcaacgagcaatcgcgctatatgcatatcaatttaagcaatacttattttaactgagttttatataacgttttcctattacaccgcttaaattcaagctctaattctaacatttggaagttgtattaaatcatgatagtgtgatagtggaaaagttataaagataaggagctgggtctaatgaagcaatttgtaaacttaggtaaatctgatgttgaagtgtttccaatcgcacttgggacgaacgcagtaggtgggcataatttatatccgaacttagatgaagaacaaggaaaagatgttgttcgtcaagccattaatcatggtattaatttattagatacggcatatatttatgggccagaacgatcagaagaattggttggagaagttgttaaagaatatccgcgagagcaaattaaaattgctacgaaagggtctcatgaatttgatgaaaatcaagaagtacatcagaacaatcaaccggaatatttaaaacaacaagttgagaatagtttgaaacgtctacaaactgattatatcgatttatattatattcattttccggataacaacactccgaaagatcaagcagttgcagcattacaagagcttaaggaacaagggaagattaaagcaattggtgtatcaaatttcacattagatcaacttaaagaagcaaataaagatggttacgttgatgttgtacagttagaatataatttattgcatcgcgaaaatgaggcagtattacaatattgtgttgatcaccaaatcacatttattccatatttcccattagcatccggtattttagctggaaaatatgatgagaacactaaatttagtgaccatcgtactacacgtcgtgattttaaaccaggtgtatttgaagaaaatgtgcgtcgcgtaaaagctttggaaagcatagctgcagcacatcaaacttcaattgcgaacattgtattagcattttatttaacgagaccagctatcgatgtgattattcctggtgcaaaacgtgcagaacaagtcgttgaaaatattaaagctgcagatatcgttttatcagatgatgagattcaatatatcgatgaactgtttccgattgaagactaaatgaattgtatttaatggtgatatatgtatctaatttcatcatgaattagccccgtatcacaaacgacgttatataaggcatgacgaaatttcgtcaaatttatataaaagttgtaagcgttttactattcggtaggcaaagcttatgatagtataattaggtaacgaaaaacacagatatttattaatcaaaagtgaggttaggctaaaatgattactgttttgtttggtgggagtagaccaaacggtaatactgcacaattaacaaaattcgctttgcaagatttagagtatcaatggattgacgtgacacaacatcagtttaaaccgatacgtgacgtgagacatacagcagagactattacttcatatgacgatgactatttgccgattctagataaaatattggctagtgatacaattatttttgcatcaccagtgtattggtatagcatttcagcaccattgaaagcatttatcgaacattggtcagaaacattacaagataaacgatatcctaattttaaggcacaaatggccgaaaaggattttagagttattttagttggtggagattgtccaaaaataaaagcgaagccagcaattacgcaaatgaaatatagtttagactttttaggtgccactttaaatggttatattattggaactgctgaaaagcctggtgacatcatgaaagacaactatgccttagcacgtgcaactgagtggaatagtatattgcaataagacatacctcatactaaacgaagtgattttttgcttcgttattttttatttttaattttaacggaaaatataaatatataaattgaatagacaatcattgtttattaagtattgagcaagttgtggtataatgccgttattaaaacttgttaataaggggagaaagtcatgttcaaggtaagacaagcaactgaaaaagatgttgttcaaattagagatgtcgcaactaaagcttggtttaatacatacttaaatatatacgctgcgacaacagttaatcacttgttagaagcttcatataatgaacatcatttaaagaaaagacttcaagaacaattattcttagtcgttgaagaaggtaatgacatcgttggctttgctaactttatttacggtgaagaattatatttatcagctcattatgttaaaccagaatcgcaacatacaggttatggtacagcattgttaaatgaaggattatcacgttttgaagataaatttgaaggtgtttacttagaagtagataataaaaatgaagaagcagtagcttactataaagagcaaggttttacaatcttacgctcttatgagccagaaatgtatggcgaaaagttagacttagcacttatgtacaaagcattttaagtaaattaaatattatattaaacgaaaaggaggggaataatgactaacgcatatgtagatttaaaattagtagaagaaaaagtttttaaagacccgatacatcgatatattcatgttgaagatcaattgatatgggatttaattaaaactaaggaattccaaaggttacgtcgaattagacaactaggaacactgtacctatcttttcacacagcagaacatagtcgctttggacattctttaggtgtgtatgaaatagttagacgattaattgatgagtcatttattggtcatgatgcatgggacaataaagatagaccgttggcattatgtgctgcattattacatgatttaggacatggtccattttcacatagttttgaaaaaatatttaatacagaccatgaagcatacacacaagcgattattactggagatactgaggtgaatgctgtattacgtaaagtggcgcctgagtttccaagagaagttgcggaagtaattaataaaacgcatcataataaattggtcatttcgatgatttcgtcacaaatcgatgcggatagaatggattatttacaacgtgatgcgtatttcacaggtgtatcatatggtgcttttgatatggagcgtattttaagattaatgcgaccttctaaagatgaagtactaatcaaagaaagtggtatgcatgcagttgaaaactttattatgagtcgttatcaaatgtattggcaaatttacttccacccagttagtcgtggtggagaagtgctgcttaataattgtttgaaacgcgcaaaacagctttataatgaaggctatgaatttaagttgcatccacatgattttattccattttttgaagagacagttacgattgaacaatatgttgaactcgatgaagcggtagttacgtattatttggaaaaatggacaaaagaagatgatgccattttaagtgatttagcaagtcgatttattaatcgagacttatttaaatatattccatttgatggctcaattattacaatatcagaactgcaagaactgtttgaagcaggtggtattaatccagattattattttgtgagtgaagcattttcggatttgccatatgactatgatcgaccggggtcaaatcgcaaaccgattcatttattaagacaagatggtacgattagagaaataagcaatcaatcattagtcattcatagtattacaggcattaatcgccaagactataaattatattatcctagagaaatggttgcaaagattaaagataagacaattagagaagctattgaaaatttgattaatgagcttaattaaacagggctaaaattgttatcgttaaatatggaggttatatcattgtctgagaaaaaaggctttaattttaatatcataaaaaatgaccctctagatggtcataaaggtacaaatattggttcaattagcttagacaatattgcaccagtttttatcgatgttgctaacaaagaagcatttattgatattggaggcatgcatgctcgtgccaaagttgaaaaaggtgtgaaatggattactgataaagctgctgttgaaggcgatgaagctaaagaatattggttgtgttgggtaacaacagaacgtaatgaacaaggaccatattacgctggtttaacagcgtgctatttattagtgaataaagcaattcgtcgtggttataaaagtatgcctgaacatgttaatatgatggataaatcaatgaaacatcatattatcattgatcaaattggtgacgagaataaagctattttaaaagactttttaatgaaccatgatgaaggtatgtggaagcattcttctgatgctttacatcaagcatttaattaaatattagaaactaaaatttcccaattaatctataaagatatgattcatttctcaatgacgacgtaaatcttgaggtgaaaataaagtcttagattgattgggagtttttttaatttttttgaaattaaattaatctgtagttaataaaaaatttgaataactgacacatttttttgatcatagctatatactttgtgaattaattcacattataataagagtgaagataagagtattataaattatctttaaataaatatatgtgaagtaaaaattacacgttagcatatcgattatgtcatttcttttaacatattaactagggaaacgttaaaagttaacggttgatatctaactaaaaacaaggtcacagtagtatgttttaatctggcgtctattacaaataaaaattacatctataattattcgttttcttttttgaaagtaatcgccaattaatatcatacatactggagtgactataaggaggacattattatgagagcagcagttgtaacgaaagatcacaaagtaagtattgaggacaaaaagttaagagctttaaaacctggtgaagcgttggtacaaacggaatattgtggcgtttgtcataccgatttacatgttaagaatgctgattttggtgatgttacaggcgttactttaggtcatgaaggtattggtaaagtcatcgaagttgcggaagatgtagaatcattaaaaattggagaccgtgtgtctatcgcttggatgttcgaaagctgtggaagatgtgaatattgtacaacaggtcgtgaaacactttgccgtagtgtgaaaaatgctggttatacagtagatggtgcaatggctgaacaagttattgttactgcagactatgctgtgaaagtacctgaaaaattagatccagcagcagcgtcttctattacatgcgcaggtgtgacaacttataaagctgtaaaagtaagtaatgtaaaacctggtcaatggttaggtgtttttggtataggtggtttaggtaacctagctttacaatatgctaaaaacgttatgggggctaaaattgttgccttcgacattaatgatgataaattagcattcgcgaaagaattaggtgcagatgctattattaattctaaagatgttgatccagttgcagaagttatgaaattaactgataacaaaggattagatgcaacagtggtaacttcagttgctaagacgccatttaaccaagcggttgatgttgtaaaagctggtgcaagagttgttgctgttggtttacctgttgataaaatgaacttagatatcccaagattagtgcttgacggtattgaagtagtaggttcacttgttggtacaagacaagacttacgtgaagcgtttgaatttgctgctgaaaataaagtaacacctaaagttcaattaagaaaattagaagaaatcaatgatatttttgaagaaatggaaaatggtactataactggtagaatggttattaaattttaaaaatattaattgattaaatatagatgaagaaggtagtgctctgaacactatcattataatcaaacacgaggttttcatgaaagatagtgaaaatctcgtgttttttggttttgaggtgttgtttgtattttataaaatggcttacatatatgaagcgttgattaagtatggaattgttaattaattgaacctatttagctttaagaaggcataacaagatgaccttattttatgctataatatttctattatgcgaagattaaggtgagtagtaaattggataaaaaagtaagtattcaaacaaagcaagtgttgaaacagcacaacgaaaaagaaaaatttgaatttactactgaaggaacttggcaacaaaggcaatctaactttattcggtatgtagaacaaattgaggatgcaacagttaatgttacaataaaagtggatgatgatagcgttaagttgattcgtaaaggcgacattaatatgaatttgcattttgttgaaggacaaacgacaacaactttttacgatatatcggctggacgaattccactagatgttaaaacattacgcattttacatttcgtaagtggagacggtggcaagctaaagattcattatgaattatatcaagataatgaaaaaatgggttcttatcaatatgaaattaactataaggagataggcgaatgaatattattgatcaagtgaaacaaacattagtagaagaaattgcagcaagtattaacaaagcaggattagcagatgagattcctgatattaaaattgaagttcctaaagatacaaaaaatggagattatgctactaatattgcgatggtactgactaagattgcaaagcgtaatcctcgtgaaattgctcaagcgattgttgataacttagatactgaaaaagcacatgtaaaacaaattgacattgctggtccaggattcattaatttttacttagataatcagtatttaacagcaattattcctgaagcaattgaaaaaggtgatcaatttggacatgtaaatgaatcaaaaggtcaaaatgtattgcttgagtatgtttcggctaaccctacaggagatttacatattggtcatgctagaaatgcagcagttggtgatgctttagctaatattttaactgcagctggctataatgtaacacgtgaatattatattaatgatgctggtaatcaaattactaacttagcgcgttcgattgaaacacgtttctttgaagctttaggtgacaatagttattcaatgccagaagatggctataatggaaaagatattattgaaataggtaaagatttagcagagaaacaccctgaaattaaagattattctgaagaagcacgtttgaaagaatttagaaaattaggcgtagaatacgaaatggctaaattgaaaaatgatttagcagagttcaatacgcattttgataattggtttagtgaaacatctttatatgaaaaatgcgaaattcttgaagttttagcaaaaatgaaagaattaggttatacgtatgaagctgatggcgctacatggttacgtacaactgattttaaagacgacaaagacagagtcttaattaaaaatgacggtacatatacgtatttcttaccagatattgcgtaccacttcgataaagttaaacgtggtaatgacattttaatcgatttatttggtgctgatcatcatggttatattaatcgtttgaaagcatctcttgaaacgtttggtgtagatagtaatcgtttagaaattcaaatcatgcaaatggttcgtttaatggaaaatggtaaagaagtgaagatgagtaaacgtactggtaatgcgattacattaagagaaattatggacgaagttggcgttgacgctgcacgttatttcttaactatgcgtagtcctgatagtcactttgattttgatatggaattagcgaaagagcaatctcaagacaatccagtttactatgctcaatatgcacatgcgcgtatttgttcaattttaaaacaagcgaaagagcaaggtattgaagtgactgctgcgaatgattttacaacaattactaatgaaaaagcgattgaattgttgaaaaaagtagctgactttgagcctacaattgaaagtgctgcagaacatagatcagcacatagaattactaattatattcaagatttagcttctcatttccataaattctacaatgctgaaaaagtgttaacagatgatattgaaaaaacaaaagcacatgttgctatgattgaagcggtcagaattacattgaaaaatgcattggcaatggtcggtgtaagcgcacctgaatcaatgtaagaacatttatatacactccaacgtagagtttctcgaaagatactttgtgttggagtgtttttaattaggtatgtgacatattggggaatgcttagtatgtgaataaggttaagaggaacgcagttggatgctactgcacaactgcataagagagcctgagacataaatcaatgttctatgctctacaaagttataatggcagtagttgactgaacgaaaattcgcttgtaacaagcttttttcaattctagtcaaccttgccggcggggccccaacaaagagaaattggattcccaatttctacagacaatgcaagttggggtgggacgacgaaataaattttacgataatatcatttctgtcccactccctctaaaatggagggtgtaaatgttaggaactgatgaattatataaagttttatatgaacatctcggaccacaattttggtggcctgctgataatgacattgaaatgatgttaggtgcaattttagttcaaaatactagatggcgaaatgcagaaattgcattgaatcaagttaaagaacacacgcattttaatccaaatcatatattagaactacctattgaaacgttacaatcattgatacattcaagtggcttttataaaagtaaatcactgacgattaaaacattattaacatggttagcacgacatcatttcaattatcaagagattaatgagcgatataaaggtggattaagaaaagaattattatctttgaaaggtattggaagtgaaacagcagatgtcttacttgtttatatattcggacgtattgaatttattccagatagctatacaagaaaaatatatgataaattaggatatgaaaacactaaaaattatgatcaattaaaaaaagtagtcacattaccaaatcattttacaaatcaagatgctaatgaatttcatgctctgttagatgtatttggtaaacattactttagagacaaagatataaagaattatgattttttagaaccttactttaaaaagtaaacgctgtgaagttagatagatgagtttatatgaaatataaaaaataatttactattttcttttagtatgtggacttatataataaatagaagcatataaagtaaaaaacagttggatgctaccgcgcaactgcataaaagcctctaatcgctaaaggtgaagaggaacgcagttggcttgcttgcgcacaactgcataaaagcctctaatcgctaaagctcaagaggctttaaaaaggagatgtgatagtgtgaagaaatcgttaattgcttttattttgatttttatgcttgtcctgagtggctgtggtatgaaagataatgataaacaaggtagcaatgataatggctcgtctaaatcgccgtaccatagaattgtttcgttaatgcctagtaatactgaaattttatatgaattaggattaggtaaatacatagttggtgtttcaacggttgatgattatccaaaagatgtgaaagagggtaagaaacaatttgatgctttgaatctaaataaagaggaacttttaaaggaaaagccagatctaattcttgcgcatgagtcgcaaaaggcaactgctaataaagtattgtcatcattagagaaacaaggcatcaaagtagtgtatgttaaagatgcacaatcaattgatgaaacatacaacacatttaagcaaattgggaaattaacgcatcatgataagcaggctgaacaacttgttgaggaaactaaagataatatcgataaagtcatagattcaattcctgctcatcataaaaaatcaaaagtatttattgaggtttcatcaaagcctgaaatatatacagcaggaaagcatacatttttcaatgatatgttagaaaaattagaagcccaaaatgtttatagtgacattaatggttggaaccctgtaacgaaggaaagtattattaaaaagaacccagatatattaatttcgacggaagctaagacaagatcagattatatggatatcatcaaaaaaagaggtggattcaataaaattaatgctgtcaagaatacacgtattgaagttgtaaatggtgatgaagtatcaagacccggtccacgtattgatgaaggattaaaagaattaagagatgcaatttatagaaaataaaccattctaattatgccccttattgctacatgtaaaaaaatacatgtttgagataaggggtttttaaaatatatttagtgaatgatagcaacgcgagtatgtgattgctataatgaatgtaattatcgatgaaagaaaagagaatgctatgacatttaataaagtattattgagctggatagtcatattgattataacaactagcatatatctattttggcagttgggggatatcaatgatgtatttaaccagtctattttaatcaatgttagattaccgagattattagaagcattgttgacaggtatgatattaacagttgcaggtcttatatttcaaacagttttaaataatgcattggcagatagctttacattaggattggcaagcggtgctacatttggttcaggattagcattatttttaggtttaacaacgttatggattcctgtattttcaataacatttagtttgataacattaataactgtattagtcattacgtcggtattgagccaaggctatccagttagaatcttaatattaagtggtttaatgattggtgcattattcaattcacttctatattttttgattttattaaaacctcgcaaattaaatacaattgccaattatttgtttggtggctttggtgatgcagaatactcaaatgtatccataatagcaatcacatttatcattgcactgtttggtatatttatcattcttaatcaactaaagttattgcaattaggagaactaaaaagtcagtcactaggcttaaatgttcaattgattacatatatcgcgttatgtatagcttctatgataacggcgataaatgtcgcatatgttggcatcattggattcattggtatggtaataccgcaactcattagaaaatggcagtggaaacaatcattaggaagacaattggctttgaatattgtaattggaggacaaataatggttatggcagattttattggtagccatatattgtcaccagtacaaataccggcaagtattatcattgcattaattggtataccagtgttattttacatgctaatatctcagtcgaaacggttacactagcacatgacatttgctaaaataaaaataactataaacataaagagggcataagcgatggatttgaatcaaattaaagcagttgtatttgatttagaaggtacgttgttggacagagttaaatctcgagagaaatttatcgaagagcaatatgaacgatttcatgactacttaattcatgttcaactggcagattttaaaaaagcatttattgagctagatgacgatgaagataatgataaacctgatttatataaagaaatcattaaacgtttccatgtagataggttaacttggaaagacttatttaatgattttgaaatgcatttttatcgttatgtatttccttattacgatactttgtatacactagaaaagctatcgcaaaaaggctttcaaattggtgttatcgcaaatggtaaatctaagattaaacaatttcgattacattcacttggtttgatgcatgttattaattatttatcaacatcagaaacagttggttttcgtaaaccacatcctaaaatttttgaagatatgattgatcaactaggggtattacctgagcaaattatgtatgttggcgatgatgcgttaaatgatgtagctccagcacgagctatgggcatggttagtgtatggtataaacaagaagatgctgaaattgaaccactcgaagaagaagttgattttacaattacaacagtggaagaattattaaccattttaccaataaaaaatgataataaaggagaaaattatggatctatttactagaaaagatggaacatcgattcattacagtacattaggtgaaggctatcctatcgtattgattcatactgtacttgataattattctgtgtttaataaattagcagcacaattagcaaaatcatttcaagttgtgttaattgatttacgtggacatggctattctgataaacctcgtcacattgaaataaaagatttttctgatgacattgttgaattacttaaatatttatacattgaagaagttgcatttgtatgccatgaaatgggtggaatcattggtgcggatatttcagtacgttatcctgaatttacatcatcacttatgttggtaaatccaacatctattgaaggtgaattaccggaagaacgtttatttagaaaatatgcccatattattcgaaactgggatcctgaaaaacaagataaatttttaaataagcgtaagtattatcgtccgagaaaaatgaatcgattccttaaacatgtcgtagatacaaatgaaatatcaactaaagaagaaattcaagcagttaaagaggtattcaaaaacgctgatatttctcaaacttatagaaatgtcgtagtaccgacaaaaattattgcaggagaattcggtgaaagaacaacaagattggaagctaaagaagtagctgatttaatccaaaatgcggactttgaagtatatcaagaatcaagtgcattcccatttgttgaagagcaagaaagattcgtcgaagatacagcttcatttatcaacaaacatcacgatgaaaagcatgtttaatttttagtgataagtgaaatataaaagtagtaattattatttgtaatataattgtaatatgactgttgttttagaaatgattgttgtataatggttgtgagcacaagacgatataaataaaaggagagagtgcttatgaaaaagctactaacggcaagtataattgcatgttctgttgtaatgggagtaggcttagtgaacactagtgccgaagcagcaagtggcaactctattgatactgttaaacaattaattaagggtgatcagtcattagaaaatgtgaaaattggcgaatctattaaagatgttttaactaagtacaaaaatcctatgtattcttacaatgaagatggaactgaacattattacgaattccatactaaaaaaggtatgttattagtaactactgatggtaagaaaaacaatggtaaagtaactcatatttcaatgatgtataatgatgctaatggtccaacatatcaagctgttaaaaattatgttggcaaagcagtaacacatacggaatatagcaaagttgctggtaattttggatatattgaaaaaggcaaaacgacttatcaatttgcctcagcaccaaaagataaaaacataaaattatatcgtattgatttggaaaaataataattaaattaatcgtgcttaaccgacaagttaaatcgcaatacttgtcggttattttattacatggcataatacagtgaatattaatttttatgatttgcgaaggggaaattaaaccaatacaataaataaagatgtttcattttaaaggagtactaccaatgcgtattaacgataaaattttactagaaaatatagaagattactttaatcataaaggtttatcaccgcatttgattgatgatattaaagagaaagtaattactgatataaaaaattctgaaaagaaagatcaagattatattgaatataaaagaaaatctccagcacaaatcatattaatgattcaaaggaatttgtttgctttacaaatgaatccagttattttctttattataaacttcattctcatatcctatttatatgataaacagtatgttcagtttcaagctattactggaatgagtctattttattgtttagtgatttttccaatgactattgttgtatacctaagggtgtcacaaaagaattacttgcgtagtaataaaatagaaatgattatgggtacaattatcgctatcatatccttgttattaattatattacaagcatttaatattacttggggcgttataccaattacaaattttggacatcaatttttctttttcattggtattattttagtaattgccggcatattttataagcgacttgagttttcgggaatcggcttattattttgtcaaaaaaccgtcgatgcaatgattcataatccacaatcagcccagattttttcattaattatatggatattattagtagttctagttatatatttcacaattagattatcttcacgtacaagattataaatatgataaaactattcacttgattaattgtattaattgagatgaatagtttttttattgttggaataacttttggtaatttataaataatttaaaaaaattgtttataaaatggaagcgtatatagaatgaaggttgggtatatagtttattgagggaggtgtcacaatgaataaagtcacaattaatcctcaaatccaattaacttatcaaattgaaggtaaaggggatcctataatattacttcatggattggatggtaatttagctggatttgaagatttgcaacatcaactagcatcatcatataaagtacttacttacgatttaagaggtcatggcaagtcttctaaaagtgaatcatacgatttaaacgatcacgttgaggatttaaaaattctaatggagaagttaaatattcatgaggcacatattctaggacatgatttaggtggggtagttgctaagttatttacagataaatatgcttatcgtgtaaaatcattaactaccattgcatcgaagaaagatgacttaatacacagctttactcaattgttaatacaatatcaagatgatatagcgggttttaataagtctgaagcgtatattcttttattttctaaattgtttagaaatcaagagaagacgatgaaatggtatcaaaaacaaagaatatatagcattaagtctgaggatgatagtgcggtggcaattcgttcattaattttgcataaagatgaacctatgtatttaaaaaaacgtacatgtgtacctactttgttaattaatggggaacatgatcctttgattaaagataagaatcattttaaattggaagcgcattttttaaatgttacgaaaaaaatcttcgaacattcaggacatgcaccgcatattgaagaaccagaagcatttatgaattattatttaaattttttaaaaagcgtatcataatatgtgatatataaacctagggcataaagtctttaggcaatgtgaaaaagctgattactattcattatttgatagaaatcagctttttttgaaatgtatttgatatatactgctcgttatgcggctatcttccttatattaagtgccattagtgcaaaacctcttaacatttacaaaaaaagacataaaaaaaggaagtttaatagaatgtatcatctatcaaacttcaccaaattgcgctaaacaaaattatagttcaatttcgttgtttgcttcagtgattcgtttatttactcgactcaataatgattcgatttttttacgttgttgtgcattaacaagaattaatacagttctttcatcatgctcattacgttttttatcgaagtaatcttcttgagataaaattttaactgctttaacaacttgtggttgtttgtagtttaaatgattaataatatctttaagatagtattctttctctttgttttcgctgatgtatgtcaatacagcgaattcttcaaagctaattgaaaattcctttttaattaaactttttaatttgtcagcataagtgaccattgataacaactcaaagcaatcattgatttttgtaattgccatgtttaaaacctccctatttgatgcatcttgctcgatacatttgcccgataatatattgatatctaatctttatttattatagatatgttagtcataattttgcattaaataagttttattaaatatatttaatgctctattatttagttaattataactaattaaaaatgagaagtaaacaaaaaagtgtttataaaacaaattattcattagacacagtgattgtatttctgggttagcatttggtttagtcaaaaatatcagcattttttataatttaccttaatttaatcgccaatacaaggtaatttatttaatgaaacgatttagcgcaattaaatgtttcgatattcaatgtgtgtctaaagagattctttgttatagcttaactcttccaagttaacttcttctactatttatacccatttttcagaattttatcactaaaaatgaaaaatttttataatttttttaatttagtaattctcagtgcagttttaatgataagaaaaacacattaatttagtgattaaaaccaatctatagcacgttaaagtgtatatacgttattccgattgataacgggtaacaaataatagaaagtacgataattgatcatgcattaaagcacttttatttttcaaactcgactcaatgaattataaaaagttgtgcattttgacttatttttaattaattgaataaccaactatgaaatattagcacgaataacataatttttgctattaatttggtgtaaattattaaaaaataacattaatttaggtcttaagaatgagttgactatcgaatttgctaaattaaaatttgttgtgtcaaagtatactacccaaatcaacgcttttctaaagatttttagaccacaaaaaaatagcttatcacttttaaaaataattacaagttaaaatgataagctaaaagttaatttaaaataatcttaaaagtataatgcctgtcaaaatacataatagaccaatagtttttctggatgtcattgctattttaggtgaaccaaataatccaaagtgatctatcaatatgcccattagaatctggccaaacatcccaataagtgttgttaatgctgcacccatatgaggcattaagataatgttagctgttacaaaagccataccaagtataccgccagtaaaatagataggctttaatttaccgaattttaaatgacttgtttttagttttaaagaacgattaaaaatagcggttaaaatcaatagcgttattgacccaattgtaaatgatactaatgatgcaaaggctggtgaatgagtatgacttgctaaagcactattaattgtcgtttgaataggtggaaagaaaccaaaaataaatcctaagagaagccaaaacagtaaatacttttgatcagttagtaataaattattcttgttaaattgattcattatgacgatgccgacaatgagtaacaatactccaattgctttaattaaattaaaatcatgaattgtagcgccaaataagccaaatgtatcaataatgacacccataataatttgacccgcaactgttgcaattacagttaatgttgcacctaattttggcaataacaataaattgccagttaaaaagctaaccccaagcaaaccaccgactacccatgtgtagttaaatgattgattattgtaaaagtgaatagtaaatacttctggattgataatgatatttaaaataattaaacaaattgttccaactgaaaatgaaatgaatgaagtatagaaaggcgatttagtatacagtgatagtcttgaattgacagatgtttggataggaataagcattccaactaggacaccaatgatatagaaaagaagcatatgaataaagtctcactttccaaagttaataataaaatcatatgaatacattatcattatagagaaaatatacaactcatttacaataatgttgaaaaaaacaggacattatcacaacaaaatcaccctagacaatcatgatgaaagtctagggtgttagtatttatactaaattaattgcgctttctttatatctatttcttatcttcaaataaaacagttgttgttttatcaataatttgagcagaatgtactttggtgatagtaccactatttgactttataatatttaaatctactaatgcattcatactatcacgtgcaacttgctcggtcactacgttgtttaattgtggtaattgcagttttacaggcttgtctagtgaagatttaaaacttaattcaagtgttttagtcatgaatatgtcctcctgattaaattgataaagatttgatgagttcgatattgttatatgtttctccagtaagtcgctcaataagtttgctgaatgttttaatttggtcgtttgatgcatcagggttaatgttagcgaatcgacgcttaaattctgtttgtttgccgttagcgtctactttagtaaatgataatacaatagtgatgtggtttattttactcatattttaaaacctcctttcacactatatatcgaaataaaataataaaatggctaattttattttctatgtttaaaatctataaaaaaggcaatagatatatgtaactaaaatataaaatagctatgattaagacacttaaagcaaggggaggttgagtaatgaataaagtagaagcgattaaatttaatgatgatattgttaaaatgtatgaagcgctcaagataaaatctgaacgtgactatttattctttaagttagctatacatagtggattgaaagtatcagaattattaacaattacagtctctcaagttaagagactaattgaaaagtgtacgttatcagaaatgtgtaaagcacattttcattcgttgattaaaattaggttaccagaaacattatcgaaagaactacttcaatatatagaggacaggagtctttcgaatgaagacgttctttttcaatcactacgaacaaatcaagtattatctagacagcaagcatatcgaataattcaccaagcatcaattgaagctggtatagataatgtaggactaacgacattgcgtaagacatttgcatatcatgcttatcaaaaaggtatacctataccagtcattcaaaagtatttagggcatcaatctgctattgaaacactaaattttatcggtttagaaaatgagtgtgaacatagtatttatatttcattacaattatagaaacaaaggaggctaataatgagtttggtttatttattaattgctatacttgtgattatggcgatgatacttctaatgtctaaacgtagagcattggctaaatatgccgggtacatagcgttggttgcacctgtaatttcatctatctattttttgattcaaataccatcagtagctaaactgcaatatctttctacctctattccatggattaagacattagatattaatttagatttacgtttagatggtttaagtttaatgttttctcttattatttcacttattggaattgcagtattcttctatgcaactcaatatttatcctctcgaaaagacaatttaccaaggttttatttttatttaacgttatttatgttcagtatgattggtattgtattatcagacaatacgatattgatgtacattttttgggaattaacgagtgtatcatcatttttattgatttcatattggtataacaacggagatagtcaatttggtgcgatgcaatcatttatgattacagtatttggtggtttggcattattagttggttttatcatgttgtatattatgacaggaacgaataacatcacagagatattaggacaagcagatcatattaagaatcatggattgtttatccctatgatttttatgtttttattaggtgcatttacaaaatcagcacaatttccatttcatatttggctacctagagcaatggctgcacctacacctgtaagtgcttatttacattcagccacgatggtaaaagctggtatctttttattacttcgatttacaccattattaggtcttagcaatatgtacgtatatatcgttacgtttgttggtttaataacaatgttatttggttcaattacagctttaaaacaatgggatttaaaaggtatcctagcgtactctacaatcagtcaacttgggatgattatggctatggtgggtataggtggcggatatgctcaacaccaacaagacgcaatagcatctatttatgtatttgtattatttggtgcgctatttcatctaatgaatcatgccatctttaaatgtgcgcttttcatgggagtaggtattttagatcatgaagcaggttcaagggatatacgaattttaagtggaatgcgtcaactatttcctaaaatgaatctagtcatgacgatagcggctctatctatggctggagtaccatttttaaatggatttttaagtaaagaaatgtttttagatgcattaacacaaactggacaattatcccaatttagtttgatttcaatgatagctatcgtgtttgttggtgttattgcgagtgtttttacattcacatatgcactatacatggtaaaagaagtattttggacaaaatatgattctaaggtttttactaaaaaaaatatccacgaaccatggttgtttagtttaccatctcttatattaatggtgctagtacctgtaatcttttttgtaccaaatatatttgggaaggggattatcgttctagcattaagagctgtatcaggtggtaatcatcaaattgatcaattggcaccacatgtttcgcaatggcatggatttaacataccgcttcttttaaccatcatcattattttattgggtagtgtactagcaatcaaagtagattggaaaaaagtgttcacaggtaaaattagacagatttcagtttcaaaaagctatgagatggtatatcgacattttgaaaagtttgctacgaagcgatttaaacgtgttatgcaagatcgtttaaaccaatacattattatgaccttaggcatatttatgattatcattggatatggttatattcgaattggacttcctaaagtacatcagttacatgtttctgaatttggggcattagaaattatattagcaatcgtaactgtcacaattggtatttctttaatttttatacgtcaacgactgacaatggtcattttaaatggagtcatcggatttgttgtgaccttattctttatagcaatgaaagcccctgatctagcattgactcagctagtagttgaaacaataacgacgatactatttattgtcagtttttcaagattaccaaacgtgccaagatctaacgctaacaaaaaaagagaaataattaaaatttctgtatcactcttgatggcacttattgttgtatcattaatttttattacacaacaaacagatggtttatcatcaatatcagacttttatttaaaagctgacaaactaacaggtggtaaaaatattgtaaatgcgatacttggtgactttagagcattagatacattatttgaaggattagtgttaattattactgggctaggtatttacacattattaaattatcaagatcggaggggacaagatgaaagagaatgatgtcgtgttaagaacggtcacgaaacttgttgtatttattttattgactttcggattctatgtcttcttcgcaggtcataataatcctggtggtgggtttattggtggtttaatatttagttcagcgtttattttaatgtttctggcttttaatgttgaagaggttttagaaagtttaccgattgattttagaattttaatgattattggagcattggtatcatctattactgcgataatacctatgttttttggaaaaccatttttgtctcaatatgaaacaacttggatacttccaattttaggacaaattcatgtaagtacaataacactttttgaattaggtattttattctcagttgttggtgttattgtcacagtgatgttgtcgcttagcggaggtcgatcatgaatttaatattattactagttataggatttttagtgtttataggaacatatatgattttatcaatcaatttaattcgtattgtaatcggaatttcaatatatactcatgctggtaatctcattattatgagtatgggaacgtatggttctagtagatcagaaccactaataactggtggaaaccaattgtttgttgatcccttgttacaagctattgtactaactgcaatagttatagggtttgggatgactgcgtttttacttgtacttgtttatagaacttataaagtaacaaaagaagatgaaattgaaggcctaaggggggaagatgatgctaagtaacttattgattttaccaatgttattaccattcctttgtgccttaatccttgtatttttaaaaaataatgatcgtatttctaaatatttatacttaggtacaatgactatcaccacaattatttcattaatgctattaatttatgttcagcgtcaccgtccaattacgctagactttggaggatggtcagcgccctttggtatacagtttttaggagattctttaagtttaattatggttacaaccgcttcgtttgtgattactttaattatggcatacggatttgggcgtggcgaacataaagcaaatcgttatcacttgccatcgttcatattatttttaagtgttggcgtgataggctcttttctaacatcagatttatttaatttatacgtcatgtttgaaattatgttactagcgtcatttgtactcattacacttggacaatctgtagaacaattacgtgctgcaattatttatgttgtcttgaatattattggttcatggctattcttattaggtataggtttactttataaaacagtaggtacattaaacttttcacatattgcaatgcgtttgaatgacatgggagataatcgcactgttacaatgatttcattaatcttcttagtcgcatttagtgcgaaagcagcgctggtcctttttatgtggctacccaaagcctacgctgtgttaaatactgagcttgcagcattatttgcagcgttaatgaccaaagtaggggcctatgcattaattcgattcttcactttactatttgatcaacataatgatctcatacatccattgctagcaactatggctgctataactatggtcatcggcgctataggtgtcattgcttataaagatattaaaaagattgcagcttaccaagtcataatctcaataggatttatcattttaggtttaggaacaaacacgtttgcaggtattaatggtgcaatattttatttggtaaatgacattgttgtaaaaacattgctattttttattattggtagtttagtttacattacaggctatcgacaatatcaatatttgaatggcttagctaaaaaagaacctttatttggagttgcgtttattataatgatttttgctattggcggcgtgcctccatttagtggctttccggggaaagtacttattttccaaggtgcattgcaaaatggcaattatattggactagcgttaatgattattactagtctaattgcaatgtacagtttatttaggatacttttttatatgtattttggagataaagatggggaggaagttaattttaagaaaatcccgctatatcgaaaaagaattttaagtattttagtagttgtggttatcgcaatcggaattgctgcacctgttgtgttaaatgttacaagtgatgcaactgagttgaacacgagtgatcaattatatcaaaaacttgtaaatccgcatttgaaaggagaggactaaatgaatcaaatagttttaaatattatcattgcattcttatgggtattatttcaagatgaagatcattttaaattctcgactttcttttctggatatctaattggtttaattgtcatttatatattacacaggtttttcagcgatgatttttatgttagaaaaatatgggtagctattaaatttttaggtgtttatttatatcaattaataacatctagcattagcacgattaattatattctttttaaaacaaaagatatgaaccctggattactttcatatgaaacaagactaacaagtgattggtcaataacatttttaacaattttaattattataactccagggtctacagtaatacgaatttctcaagactctaaaaagttttttattcatagtatcgacgtgtcagaaaaagaaaaagatagtttgttaagaagtattaagcattatgaagacttaatattggaggtgtcgcgatgatacaaacaataacacatattatgattattagttcactcattatttttggaattgcattaatcatctgtttatttagattaatcaagggacctacaacagcagatcgtgtcgttacatttgatacaacaagtgctgtcgtaatgtcaattgtgggtgtgttaagtgtacttatgggcaccgtttctttcttagattcaatcatgctcattgccattatatcttttgtaagttctgtttcaatatcacgctttattggtggggggcatgtgtttaatggaaataacaaaagaaatctttagtcttattgctgctgtgatgttgttgttaggtagttttattgctcttattagtgcaataggtatcgtgaaattccaagatgttttcttaagaagtcacgctgcgacaaaaagttcaactttatccgtgttattaactttaatcggtgtattaatttattttattgtgaatacaggatttttcagtgtgcgtttattactgtcacttgtttttattaatttaacttcaccagtcggcatgcacttagtcgctcgcgctgcttatcgcaacggcgcttatatgtatcgaaaaaatgatgctcacacacatgcatcaatattattaagttcaaatgaacaaaactctacagaagcattacaattacgtgctgaaaaacgagaagagcatcgtaagaaatggtatcaaaacgattgaagtgttggctaaattgttaagcataacaatgcttttgaaaatctgttttcaaaattaatcattaaaagagtactttgaaattggttagtcgattttaaggtgctcattttttgtattataagttaatgttgttatgtgaaagcaagttgtttatttatacaaacaattagtgataaaataaaattaaataattgcaaatttaagtactgcaatcgtagacatatatctatattaaagtgcttttgtggtcgctaactcaatttatcctctaaagtataattacaacgagatgtgatacttaattttcaattaaacaatactttttagagaggtgaaagtttggaaatatttgaaacaattcttatatttatagctgttgtgatactaagttcgtttgtccatactttcatacctaaagtacccctagcatttatacaaattttcttgggcatgttactatttattaccccaatccctgttcaatttaattttgattctgaattgtttatggtaacaatgattgcgcctttgttatttgtagaaggtgttaatgtttctagagtccatttaaggaaatatattaagccagtgatgatgatggcattaggattagtcattactactgtgataggtgtaggtttatttattcattggatttggccagatttacctattggagcagcatttgcaattgctgccattctttgtcctactgatgcagtagcagtgcaagcaatcactaaaggaaaggtcttgccaaaaggagcaatgacaattcttgaaggtgagtcattattgaatgatgctgctggtattatttcatttaaaatagctgttggagtattagttacaggtgctttttcacttgttgatgctgttcagttgtttttaattgcatcaattggtggcgcagtggttggtttacttataggtatggcattagtaaggttccgattaacattgatgcgtcgaggatatgaaaacattaatatgtttacaattattcaattgttaacaccatttgttacgtatttaattgctgaattgtttcacgcatcaggaatcattgcagcagtagttgcaggacttgtacatggtttcgaacgtgacagaattatgcaagtacgtacacaactgcaaatgagttacaatcatacatggaatatactaggttatgttttaaatggctttgttttttcaatattaggatttttagtacctgaagttattattaaaattatcaaaacagaaccgcacaatttaatctttttaataggcatcactattgttgttgctttagctgtctatctatttagatttgtttgggtttatgtcttatatccttatttttatttagccatcagtccattccaaaaaatgatgactaaaaatgatgatgataatccaacgactgagaaaccaccaaagcgaagtttatacgctttaattatgacgttatgtggtgtgcatggaacaatttctttagcaatcgcattaacgttaccgtattttttagcagggcatcatgcttttacgtatagaaacgacttattatttattgcatctggtatggttattattagtttggtagttgcgcaagtattattgccattattaacgaaacctgcacctaaaacagtaattggcaatatgtcgtttaaagttgctagaatttatatattagaacaagttattgattatctaaatcaaaaatctactttcgaaacaagttttaaatatggtaacgtgattaaagaatatcatgataaattagcatttttaaaaactgtagagaaagatgatgaaaactctaaagaattagaacgtctacaaaaaattgcttttaatgtagaaacaaaaacattagagtctttagtagatgaaggacaaataacgaatagtgtacttgaaaactatatgcgttatgctgaaagaacacaggtatatagacaagcatcattaataagaagaatgattgtattattacgaggtgctttattaaaacgaagagtacaaacgagagtgaactccgcatcttcacttagtgttacggataacttaatggaattaaataaaattaataaattagtccattataatgtggttagtcgtttgtctaaggaaacaacaaaagataatacacttgaagttggaatggtttgtgacggttatttaatgcgaattgaaaacttaacaccatcaaatttcttcaactcagcaagtgaagatacgattactaaaattaaattaaatgcattgagagaacaacgtcgcattttacgtgagttgattgatacagatgaagtatcagaaggtacagcgttaaaactaagagaagccatcaattacgatgaaatggttattgtagatagtatgacgtagttcctaattatgctaaaagggattgatgaaaaactgaagggcttttcatcaatcccttttattttatgggaattgaatagatagttttaaactatacgaattattaatatttgagatttaattgaaataagttttaaaaattggaggagatagattaagcgaagtcatttaaaggtgaagttaagtgtattcacaaaaaatagccacactcatatgacatcggatgagtgtggcttaaggatctatgggggggaggaaaccatagatgtttactttgataggccagattaaatatcaaagtatgcgattatttatagcttgatgcaaaagtggtatgcctattaaaagttactgcacatagcttttaatattccgttcaaaggaaaggggcatacaattgaacaatctgtaatagtacttttaaccagctatgctaaaagtctagtagggagaacagttgtccaatcacataagaacctctaacttcgttagtacgattaagaaaagctttttagttagtatgtaatacaatttattgacgcgcgtgaatctcttttataagagtgtgtagggaatggcgttgtataaattgtattagaagaacttctaacgcatctctgtggttaaaagagatgaagggaacgacagtttaattaaaactgcataagaacttctagcttttctctctcgttcaaagagaagcagctgttcgcagtttaatcaaaaccacataaagcttttaactttactctttgatttaaagagtgataaatgtttacagtttaattaaaactgcataagaacttctagcttttctctctcgttcaaagagaagcagctgttcgcagtttaatcaaaaccacataaagcttttaactttactctttgatttaaagagtgacaaatgtttacagtttaattaaaactgcataagaacttctagcttttctctttcgttcaaagagaagttctaataccaccatatcgtgcgatcgggaacggtatatatattaataggagggtaatatatatttaacgcacgatatgggactattagccttcgactttgttatgttgatgtgtggcctaaaatattggagataccaatattttaggttgcatcaacatcaattcatcttacttcattaaaacacagcgtgttatttcatgcttccgtgtacagtttcaatatttgatttcatcattttgtagtaagagtcacctttagtgccttctttaccgattgaatctgtgtacacttcaccaaagatatctttcttcgtttcttcagataaactttccattgctttcttatcaacacttgtttctactaataagtgttttaatttgtgctttttaacaaactcaatagcttgtctcatttgttcaggtgtaccttgtttttcagtgttaatttcccaaatataacctggtgtaataccgtattgttttgagaagtacttgaaggcaccttcacttgtaatcatggcacgttgttcttttggaatgtcattaaatttgtctttactgtcattatttaatttttccaattgagcaatgtatttgttaccttgcttttcataatctgctttatgttttttgtcgttatcgataaatgtttgttgaattgtttttacgtatttaataccgttatctaaacttaaccatgcgtgtggatcttgtttatctttgttgccttcttcaccgtttaaatagataggtttaacatcttttgatactgcgataacttttttatcttttaatgatttaccagcctgttctaaggctttttcaaaccaaccgttaccagtctctaaatttaatccgttgtataaaataacgtcagcgtcagttaactttttaatatctttaggtttaacttcatattcatgaggatcttgaccaacaggtacaatactatgaatatcgacgttgtctccaccaacatttttagccatatcatataaaattgaattcgtcgttactacttttaatttgccatttgacttatcactgctttgtttaccaccagtaccacatgcagcaactagaagtaataaggctaataataaaggtactaattttttcatgttaaacttcctcgtttctttctattcgtaaattttgtgaaaaataatgtgatgatataaattacaaacgtacaaagtacgattgtcgcaccactaggaatgttgtaaatatagctgtaataaagtccgacaattgaacttatgacacttattaaacttgctataatcatcattgagtatagttttttactaattaaaaatgctgtagatgcaggtgtaattaataatgcaactacaagaataatacctaccgtttgaatacttgctactgttactaatgagagtaacaacatcacaaagtaatgtaataacgtcgtatttagaccactcattctactaaacgttggatcgaatgtagaaatcattaatggacgatagaaaataatgattagaataaggacgattgaaccaatcacaatagttgttaaaaatgcactatttgtgattgccagtaaattaccaaacagaatatggtacaaatctgtcgtagtgtttattaagctaataataataatccccgaagctaagaaagcggtaaaactaattccaatagcggcgtcaggtttcgttttactactagatgtgatataaccgataaaaatacttgcgatcataccagttataagtgcgcctacaaacattggaataccaaataagaatgatagggcaacaccaggtaatactgcgtgactcattgcatctcccattaatgaaagaccacgtaatacaattaaactaccaactgtaccacaaactatccctacaataattgaagttatcaatgctcgattcaagaattgatatgtaaataaatgttcgacaaactctaacatgttatattgctcctttgactagggtcactacagtcagtgctactcataaatgtttcgtttaagcgagtgacactcatagcctcttcactatcaccaaagtatcgtaatgtttgatttaatagaataatgcgatcaaagtattgctttgcttttgatagatcatggtggatgataagaataagttttccttgttgttttaagttctcgatttttgtcatgattaatttttcgctactaaaatcaattccgacaaacggctcatctagaaaataaacttcactttcggacatcaatgctcttgctactagcacacgttgtaattgtccaccacttaattctgaaatttgtcgatgacgtaaagattctaattctaaatcgcttaataactgtttgagtttatcccttgctgatttattaggtcgtctaaaccatccaatttctttgtagcaacctgataaaatcacttgttccacacttataggaaaatctaaatcaatatgtgctttttgtggaatatatgtaatatgttgcagttgttgttgtataggtttgttatataacaatttagtaccggtagcattaaattcaccaattaaagacttgataagggaagatttaccagcaccattcgggcccatgataccaattatttcgccgcgtactggtatcgataaggaaatgtttttaagtacatgcttattacctaaaaacagatttaaatcttttgtttctaacaaacgtttatacctcctaattaaaagtttaggctaacctaattaattgtataataaactgagaatatttatcatgtcaagtaaattcgtgatataatatagacaatgtatgtgaggtgaaagtatgttaactgaagaaaaagaggactatttaaaggcaatccttacgaataatggcgataaaaactttgtgacaaataaaatcttatctcaatttttaaatattaagcctccatctgtaagtgaaatggtaggacgtcttgaaaaagcaggctatgttgaaacaaaaccatacaaaggtgttagattaacagaggatggtttaacgcatacgcttgatatcattaagagacatcgactattagaattatttttaatagaaatattgaaatataattgggaagaagtacatcaagaagcagaaattttagaacatcgaatttcagatttatttgttgaaaggctggatagcctgttaaatttcccagaaacttgcccgcacggcggtgtgattcctagaaataatgaatataaagagaaatatataacaacgattttgaattatgaacctggtgatatcgttacaatcaaacgtgtgagagataagaccgatttgctaatatatttgtctagtaaagatatttctattggtaatgaagtggaaattgtatcgaaagatgaaatgaataaagtaattatcattaaacgtaatgataatgtaattattgtcagttacgaaaatgcaatgaacatgtttgctgaaaaataaaataaagaagccataaagatatccatgattgaactgataaagacatatggataattgctttaggcttcttttttattagttaatttatcaagtgagtatatttgagtaaaatattcactgcataaagattgaagataatccagattgtactataaatgaagataggtacatgactgagttctttaagtgcactaccatcccactgtggactcggacgctggaaagtcaatttagcaatcgtccaactagattgtagaacttcgcctaataatacacctaaaatatattgataactcattgtgacaagtagttgaatttctactatattttcatcttttaatataaaatacaacatgatagaaattaaagttataacaacaatgggtgagccttttctagatgttaaaattaaaaaataaataaatatcaataaataggtaaatataaagaaactaggtatctgataatggctcgacgctaaacctatcaataacataataggtggcattaaataaccaccaatcgttgtaagccattggcctgctagatgtctagattgtgtaattgcgaatccttgttgtaatgtctgttgtcgctctcgtggacttgttacaatgactaaatcttttgcacggccaccagcgagtttattaaacagtacatgaccaaattcatgtgttaaaacagggatatagtttaaaatgacatctaaatagttcaaaacaggcttatgtctatattgatgaatagcaatataacaagctgcaacaataacgataatgtatatattaagttgaattgtcgtattaaaaaagtttgataaataattcattgttaacctcatataagatattaatttaaagtttgcttagcacttattataaatgatattggcatcaatagcgttagactttagacttaccttagttaaactaattttaatttttgaaaaggtgaatatgtgttaaaataaagcaaaatcatttcgatataaataggatgaatataaatactgttaatattgattacactaacataataatgaaataagataggagattcctgttatgactgttgaagaaagatccaatacagccaaagttgacattttaggagtcgattttgataatacaacaatgttgcaaatggttgaaaatattaaaaccttttttgcaaatcaatcaacgaataatctttttatagtaacagccaaccctgaaatagtgaattacgcgacgacacatcaagcgtatttagagttaataaatcaagcgagctatattgttgctgatgggacaggagtagtcaaagcttcgcatcgtttaaagcaacctctagcgcatcgtatacctggtattgagttgatggatgaatgtttgaaaattgctcatgtaaatcatcaaaaagtatttttgctaggggcaactaatgaagttgtagaagcggcacaatatgcattgcaacaaagatatccaaacatatcgtttgcacatcatcacggttatattgatttagaagatgagacagtagtgaaacgaattaaactgtttaaacctgattacatatttgtaggtatgggattccctaaacaagaagaatggattatgacacatgaaaaccaatttgaatctacagtgatgatgggcgtaggtggttctcttgaagtatttgctggggctaaaaagagagcgccttatatctttagaaaattaaacattgaatggatatatagagcattaatagattggaaacgtattggtagattaaagagtattccaatatttatgtataaaatagccaaagcaaaaagaaaaataaaaaaggcgaaataatcatgatgacaaaaataaaaccgaggaaatccttaaatggagattctcggttttttcggtttatttaataacgaagcgggactcatcgagtttgtttctaaattctttttgttcggctttggatttctttttaaaatcgttaaggaaagcttcatatttaggtaatacatcatcaagttcaccgtaatcttttaactttccgccttcaatccaagcaatcttagtacaaaattgtctcacttgtcctaagttatgactaacgaaaaagatggttttgttttgctctttaaactcgtaaattttatctaaacatttttgtgcaaaagtttggtcacctacagataaagcttcgtcaatgactaagatatctggattaactgtgatattaattgaaaaaccaagttttgcacgcataccacttgaatactttttaactggttgataaataaactcaccaagttcactaaattcaataatcttaggtgtcatcgctttaatttcttttcgcttaaagcccatacataacattttaaattcgatattttcaatccctgtaagttgtccactcaagccagcactaattgcgataacgctgacttcaccattacgatccactttgccaacagtaggcgacaaagaaccgccaatgatattgctcaacgttgatttgccggaaccattgatgccaacaagccctatgacgtcgccttcatatgcttttaaactaatgtcatctaaagcgaaaaatgttttgtttttatgtttgggaatgagcgcatctttcatacgttctttatttgtacgataaatacgatattcttttgttacatttttaatgtttaccgaaacgttcatttgtagaccttccttattcacatttatctagattataatatactactcaacagttgttaaattttaaaacctgttgtaaagtgtatagaagattttgttattatcagagttggtgttttgacacaaaatgttaatcatcaatgataacaatgatatttaaaaactaaacttatttcaacttacatgattgtatactataatgtatttgtaataaactaatattttaaagaactagacaataattttgatagcatccatgtatagtgatagtatttacaacaattattataatactatttagttaagtagagaaatagttaaacatttgaaagtgtggtttaatggaatgtcagcaataggaacagtttttaaagaacatgtaaagaacttttatttaattcaaagactggctcagtttcaagttaaaattatcaatcatagtaactatttaggtgtggcttgggaattaattaaccctgttatgcaaataatggtttactggatggtttttggattaggaataagaagtaatgcaccaattcatggtgtaccttttgtttattggttattggttggtatcagtatgtggttcttcatcaaccaaggtattttagaaggtactaaagcaattacacaaaagtttaatcaagtatcgaaaatgaacttcccgttatcgataataccgacatatattgtgacaagtagattttatggacatttaggcttacttttacttgtgataattgcatgtatgtttactggtatttatccatcaatacatatcattcaattattgatatatgtaccgttttgttttttcttaactgcctcggtgacgttattaacatcaacactcggtgtgttagttagagatacacaaatgttaatgcaagcaatattaagaatattattttacttttcaccaattttgtggctaccaaagaaccatggtatcagtggtttaattcatgaaatgatgaaatataatccagtttactttattgctgaatcataccgtgcagcaattttatatcacgaatggtatttcatggatcattggaaattaatgttatacaatttcggtattgttgccattttctttgcaattggtgcgtacctacacatgaaatatagagatcaatttgcagacttcttgtaatatatttatatgacgaaaccccgctaaccattaataaatggaagtggggttcatttttgtttataatttaagtaaataacatattaagttggtgtattatgaacgttttaataaagaaattttatcatttggtagttcgaatactttctaaaatgattacgcctcaagtgattgataaaccgcatatcgtatttatgatgacttttccagaagatattaagcctatcatcaaagcattaaataattcgtcgtatcagaaaactgttttaacaacaccaaaacaagcgccttatttatctgaacttagcgacgatgttgatgtgatagaaatgactaatcgaacattggtaaaacaaattaaggctttgaaaagcgcgcagatgattattatcgataattattacctattactaggtggatataataagacttctaatcaacacattgttcaaacgtggcatgcaagtggtgcattaaaaaactttggattaacagatcatcaagtcgatgtgtctgacaagacaatggttcagcagtaccgtaaagtttatcaagcgacggatttttacttagtgggttgtgaacaaatgtcacaatgttttaaacagtctttaggtgcaacagaagagcaaatgttgtattttgggcttccgagaattaataaatattacacagctgatagagcaacggttaaggcagagttaaaggataaatatggaattacaaataagttggcattatatgtaccaacatatagagaagataaagcagataatagggctattgataaagcttattttgaaaaatgtttaccaggatatacactgattaataaattacatccatcaattgaacattcagacattgatgacgtatcttcaatcgacacgtctacattaatgctaatgtcagatataattattagcgactatagttcgctgccaatagaagctagcttgttagatattccaactatattttatgtgtatgatgaaggaacatatgataaagtgagaggcctgaatcaattttacaaagcaataccggatagctacaaagtgtatactgaagaagatttaataatgacgatacaagaaaaagaacatctattaaatccgttatttaaagattggcataagtataatactgataaaagtttacatcagctcacagaatatatagataagatggtgacaaaatgaggcttacgataatcatacctacatgtaataatgaggcaacaattcgacaattgttaatatctattgagagtaaagaacactatagaatcctttgtattgatggtggttctactgatcaaacaattcctatgattgaacggttaccaagagaactcaagcatatttcattaatacaattacaaaatgcttcgatagctacgtgtattaataaaggtttgatggatatcaaaatgacagatccacatgatagtgacgcatttatggtcataaatccaacatcaatcgtattgccaggtaaattagataggttaactgcagctttcaaaaataatgataatattgatatggtaatagggcagcgagcttacaattaccatggtgaatggaaattgaaaagtgctgatgagtttattaaagataatcgaatcgttacattaacggaacaaccagatttgttatcaatgatgtcttttgacggaaagttattcagtgctaaatttgctgaattacagtgtgacgaaactttagctaacacatacaatcacacaatacttgtcaaggcgatgcaaaaagctacggatatacatttagtttcacagatgattgtcggagataacgatatagatacacatgctacaagtaacgatgaagattttaatagatatatcacagaaattatgaaaataagacaacgagtcatggaaatgttactattacctgaacaaaggctattatatagtgatatggttgatcgtattttattcaataattcattaaaatattatatgaacgaacacccagcagtaacgcacacgacaattcaactcgtaaaagactatattatgtctatgcagcattctgattatgtatcgcaaaacatgtttgacattataaatacagttgaatttattggtgagaattgggatagagaaatatacgaattgtggcgacaaacattaattcaagtgggcattaataggccgacttataaaaaattcttgatacaacttaaagggagaaagtttgcacatcgaacaaaatcaatgttaaaacgataacgtgtacattgatgaccataaactgcaatcctatgatgtgacaatatgaggaggataacttaatgaaacgtgtaataacatatggcacatatgacttacttcactatggtcatatcgaattgcttcgtcgtgcaagagagatgggcgattatttaatagtagcattatcaacagatgaatttaatcaaattaaacataaaaaatcttattatgattatgaacaacgaaaaatgatgcttgaatcaatacgctatgtcgatttagtcattccagaaaagggctggggacaaaaagaagacgatgtcgaaaaatttgatgtagatgtttttgttatgggacatgactgggaaggtgaattcgacttcttaaaggataaatgtgaagtcatttatttaaaacgtacagaaggcatttcgacgactaaaatcaaacaagaattatatggtaaagatgctaaataaattatatagaactatcgatactaaacgataaattaatgtaggttattataaaataaatataaaacggacaagtttcgcagctttataatgtgcaacttgtccgtttttagtatgttttattttctttttctaaataaacgattgattatcatatgaacaattagtgctaatccagcgacaaggcatgcaccaccaatgatagtgaataatggatgttcttcccacatacttttagcaacagtatttgccttttgaataattggctgatgaacttctacagttggaggtccataatctttattaataaattctcttggatagtccgcgtgtactttaccatcttcgactacaagtttataatcttttttactaaaatcacttggtaaaacatcgtaaagatcgttttcaacataatatttcttaccatttatcctttgctcacctttagacaatatttttacatatttatactgatcaaatgagcgttccattaatgcattccccatcatattacgttgcttctcgccaccaaggtttttatagtctcccgcacccatgataacttgattaattctaaatttacctcgtttggtagtaatcgtatggttgtaatttgctgtatcacttgatccagtttttaaaccatctgtacccggcaaactcatttttgcaccttccaatgaaaagttgaatgtgtaatacgtaactgcatgcgttgttggtgctaactgctttgtaaagtctaatattttaggtgtctctttaatcacgtgtaaatctaaaatggcatagtctctagcagtcgttacagtacgttcttggtctttatactttgttggtgcaaatgaacgtaatcttgaattttcagcacccgttggattgacgaaatgtgtatttttcattccgatagctttagctttgttattcattaaatcaacgaaatcgctggtgttttttgataccttcttagctaaaattaatgccgcggcattactagaattagatactgtaatttgtaataggtctgcgattgtccatacttgtccaggatatagtttcgtattactcaactcaggtagtgtagacataatatattctttgttcgtcattgtgacagtgtcatcaagtgaaagctgccccttatttacagcttccaatgttaagtacattgtcattaatttggtcatagacgctggattccacttagtatcgatattgtattgatacagtaattgtccagtttgacttacattaacagcactcgtcggttcgtatgcagctgacaaacctgcataaccatattgatttgctgcttgtacaggggttacgtcactgttagcagcttgtgcatatggtgtcataatacttaatgttaaacataaaatgatgataatagatattaaatttttcataaagcgttaatcttcccttttccaattcttaaatattccctaaaagcaatggttattcctacttacggaaatcattgctaattcacttcaccttaattaaattgttgaaaataaagttttctgcagttaatttgaaaaataatgcaaatatattacgtgtgtagctaaaggtgttataatgtttgtacgaagagcaaacttactcaaaagcgattaattttcatgttttaatataaagactttgagaagttattacaaaaaatgcaatagaaatattctatcatataaatgttatgagcggtattttggggcaacactttatttgatttttaaagttttgttgggagaaagtatatgatagaaatgcatgtatctatctaaatgaattaactataaatttcaaacagaagaggtaaaactatgaaacgagaaaatccattgtttttcttatttaaaaaactatcatggccagtgggtcttatcgttgcagctatcactatttcatcactagggagcttaagtggactattagtgccactgtttactggacgaattgtagataaattttccgtgagccatatcaattggaatctaatcgcattatttggtggtatctttgttatcaatgctttattaagcggattaggtttatatttattaagtaaaattggtgaaaagattatttatgcgatacgctcagttttatgggagcatatcatacaattaaaaatgccattctttgacaaaaatgaaagtggtcaattaatgagtcgattaactgacgatacgaaagtgataaatgaatttatttcacaaaagctacctaacttattaccatcaatcgttacattagttgggtcactaatcatgttatttattttagattggaaaatgacattattaacatttataacgataccgatattcgttttaattatgattcctctaggtcgtattatgcaaaagatatcgacaagtacacaatctgaaattgcaaacttcagtggtttgttagggcgtgtcctaactgaaatgcgtcttgttaaaatatcaaatacagagcgtcttgaattagataatgcacataaaaatttgaatgaaatatataaattaggtttaaaacaggctaaaattgcggcagttgtacaaccaatttcaggtatagttatgttgctaacaattgcaattattttaggttttggtgcattagaaattgcgactggtgcaatcactgcaggtacattaattgcaatgatattttatgttattcagttatctatgcctttaatcaatctttcaacgttagttacagattataaaaaggcagtcggtgcaagtagtagaatatacgaaatcatgcaagaacctattgaaccgacagaagctcttgaagattctgaaaatgtattaattgatgacggtgtattgtcatttgaacatgtagactttaaatatgatgtgaagaaaatattagatgatgtgtcgttccaaatcccacaaggtcaagtgagtgcttttgtaggtccttctgggtctggtaaaagtacgatatttaatctgatagaacgtatgtatgaaattgagtcaggtgatattaaatatggccttgaaagtgtctataatatcccgttatctaagtggcgacgcaaaattggatatgttatgcaatcaaattcgatgatgagtggtacaattagagacaatattttatacggaattaatcgtcatgtttcagatgaagaacttattaattatgctaaattagcgaactgtcatgattttatcatgcaatttgatgaaggatatgacacgcttgtaggtgaacgaggattgaaactgtctggcggacaacgtcaacgtattgatattgctagaagttttgttaaaaatcctgatattttgttacttgatgaagcaacagctaatctcgatagtgaaagtgaattgaaaattcaagaagctttagaaacattgatggaaggtagaacaacgattgtcattgcgcatcgtttgtctacaattaaaaaagccggtcaaattatattcttagacaaaggacaggtaacaggtaaaggtacgcattcagaactgatggcatcacatgcgaagtataaaaactttgtagtgtctcaaaaattaacagattaattttatatataagtaagcttggagcaaatacacatataccatcgaggaaattaaagtgtggcacattgatggatatagatgttaataaattgcttcaagcttttgtctattttaaatcatttgagaagttacgacataataattcttaaattaatgaaatcgatattttaagaaaaaaatgctcatggtataatacaagttataagcaaacatacatatattaaatactgtagccacgagtcataattcttcatattttacatagcaatttaactgattttagagtccatggtacagaagtttgatatttcaatgtttctaaatttttaaaaaattaaatcataggtgggtgccaaatgtttttattaatcaacattattggtctaattgtatttcttggtattgcggtattattttcaagagatcgcaaaaatatccaatggcaatcaattgggatcttagttgttttaaacctgtttttagcatggttctttatttattttgattggggtcaaaaagcagtaagaggagcagccaatggtatcgcttgggtagttcagtcagcgcatgctggtacaggttttgcatttgcaagtttgacaaatgttaaaatgatggatatggctgttgcagccttattcccaatattattaatagtgccattatttgatatcttaatgtactttaatattttaccgaaaattattggaggtattggttggttactagctaaagtaacaagacaacctaaattcgagtcattctttgggatagaaatgatgttcttaggaaatactgaagcattagccgtatcaagtgagcaactaaaacgtatgaatgaaatgcgtgtattaacaatcgcaatgatgtcaatgagctctgtatcgggagctattgtaggtgcgtatgtacaaatggtaccaggagaactggtactaacggcaattccactaaatatcgttaacgcgattattgtgtcatgcttgttgaatccagtaagtgttgaagagaaagaagatattatttacagtcttaaaaacaatgaagttgaacgtcaaccattcttctcattccttggagattctgtattagcagcaggtaaattagtattaatcatcatcgcatttgttattagttttgtagcgttagctgatctatttgatcgttttatcaatttgattacaggaatgatagcaggatggataggcataaaaggtagtttcggtttaaaccaaattttaggtgtgtttatgtatccatttgcgctattactcggtttaccttatgatgaagcgtggttggtagcacaacaaatggctaagaaaattgttacaaatgaatttgttgttatgggtgaaatttctaaagatattgcatcttatacaccacaccatcgtgcggttattacaacattcttaatttcatttgcaaacttctcaacgattggtatgattatcggtacattgaaaggcattgttgataaaaagacatcagactttgtatctaaatatgtgcctatgatgctattatcaggtatcctagtttcattattaacagcagctttcgttggtttatttgcatggtaatatgttgaagagtgactatgataatacattttaactaataaatatgtccaggcatgtcgtctattaatataggtgagatgcttggacttttttattattggtataaagatatttaaatatttttaaagttaccgaaattgaagcattataaaaaccaagtgcacatggtaatacacttggcttttatgggaaatgaatattattgtacatatgacagtaaggactaggtacagtcatagtacttcgagcaaaatttgttttgttattataaacaacacaaaggagataacttctctattgaagaagttaaaaacattatagcagacaatgaaatgaaagtaaattaaaaattcagaatatttttaattattatattgtgagtgatatttattagggaaagctattcttcatataaattagttaaatagtaaatctttgttagaactctttccatagagttgtgacagcatttttgttgtgctactatttttatagtctaataaatatataaaggggatggtttcgtgaataaaacggttaaagatttaatactagttgtcttaggttcatttatctttgctgcaggtgtaaatgcatttattatttctggtaacttaggtgaaggcggggttacaggtttagcaattattttatattatgcgtttcatatttcaccagccatcactaacttcttggtcaacgcagtattgattgccataggttataaatttttgagtaagagaagtatgtacttaactattcttgtaacaattcttatttcaatatttttgagtttaacagaatcatggcaagtagaaactggaaacagcattgtgaatgccatttttggtggtgtaagcgttggactaggaatcggagtaattatccttgcaggcggtacaacagcaggtacaacaattttggcgagaattgcaacgaaatacctcgatgtaagcacgccatatgctttgcttttcttcgatatgatcgttgttgcaatttcacttacagttattccacttgataaagtattagtaacagtaatatcactttatataggaacaaaagtgatggaatatgtcatagaaggtttaaacactaaaaaagctatgacgattatttcaactaatcccgacaaacttgccaaagcaatagacgagcaaattggaagaggtttaaccattttaaacggacatggctattatacgcgtgaagaaaaagatgtcttatacgttgttatttctaaaacacaagtttcaaaagcaaagcgattaattaaacaaatcgataaagatgcattcctcgtaattcatgatgtaagagatgtctatggtaatggctttcttgcagatgaataaataaatggtatgagcacacatacttaaatagaagtccacggacaagtttttgaactatgaagacttatctgtgggcgttttttattttataaaagtaatatataagacatgacaaatcgagctatccaatttaaaaagtaatgttagtcaataagattgaaaaatgttataatgatgttcatgataatcattatcaattgggatgcctttgaaaattgataatttaaaaatagaaattattttttataaacagaaagaattttattgaaagtagggaaattatgaatcgtttgcatggacaacaagttaaaattggttacggggataacacgattataaataaattagatgttgaaataccagatggcaaagtgacgtcaatcattggtcctaacggctgcgggaaatctactttgctaaaggcattgtcacgtttattggcagttaaagaaggcgaagtatttttagatggtgaaaatattcatacacaatctacgaaagagattgcaaaaaaaatagccattttacctcaatcacctgaagtagcagatggcttaactgttggggaattagtttcatatggtcgttttccacatcaaaaaggatttggtagattaactgctgaggataagaaagaaattgattgggcaatggaagttacaggaactgatacattccgacaccgttcaatcaatgatttaagtggtggtcaaagacaacgtgtttggattgcaatggcattagcacaaagaactgatattatctttttagacgaaccaacaacatatttagatatctgtcatcaattagaaatactagaattagttcagaagctaaatcaggaacaaggttgtacaattgtcatggttcttcatgatatcaaccaagcgattcgtttctcagatcatcttattgcgatgaaagaaggggatatcatcgctacaggttcaacagaagacgtattaacacaggaaattttagaaaaagttttcaatattgatgttgttttaagtaaagatcctaaaactggaaaacctttattggtaacttatgacttatgtcgcagagcttattcttaattaagtaagttaatatgataaaaaggacaattaacatgacaaatagagagaattcaacgccattgaagtttttagcctatattataggtttaagtatgatactactaatcacactatttatttctacattaataggtgacgccaaaattcaagcctctacaattatagaggctatttttaattataatcctagcaatcaacagcaaaacatcatcaatgagattaggattcccagaaatatagcagcagtaattgtgggtatggcgcttgcagtttctggtgcgattatacaaggtgttacccgtaatagtcttgctgatccggcgctcataggtttaaattcaggtgcttcatttgctttagcattaacatatgcagttttaccaaacacttcatttttaatattgatgtttgctggatttttaggtgctattctaggaggtgctattgtattaatgataggccgatctagacgtgatggatttaatccgatgcgtattattttagcgggtgcagcagtaagtgctatgttagcagcgctaagtcaaggtattgcattagcttttagactaaatcaaacagtaacattttggactgctggaggcgtttcaggcacaacatggtcacaccttaagtgggcaattccattaattggtattgcgttattcattatattaacaattagtaaacaacttaccattttaaatcttggtgaatcattagctaaaggtttaggtcaaaatgtaacaatgatcagaggcatatgtttaattattgctatgattctagcaggtattgcagttgctatcgctggacaagttgcatttgtaggtttgatggtacctcatatagcaagatttttaattggaactgattatgctaaaattctaccattaacagccttgttaggtgggatactcgtgcttgttgccgatgtgatagcacgatatttaggagaagcgcctgttggtgcaatcatttcatttatcggtgttccttactttttatatttagttaaaaaaggaggacgctcaatatgattagttcaaataataaacgcagacaatggattgcactggctgtttttagcattctactatttctaggttgtacttggagtattacctcaggtgaatacaacatacctgttgaaagatttttcaaaactttaattggacaaggtgatgccattgatgagttaatcttattagatttcagattacctcggatgatgattactattttggctggcgcagcgcttagtattagtggtgcaatagtgcaaagtgtcacgaaaaatccaatagctgaacccggtatattaggtattaacgcaggtggcggatttgcaatcgcattatttattgcaattggtaaaattaatgctgacaactttgtttatgtactgccgttaataagtatactaggtggtatcgccactgcattgattatttttattttcagttttaataaaaatgaaggtgttacacctgcgagtatggtattaataggtgtaggtttacaaacagcattatatggtggctcaattacaattatgtcaaaatttgatgataagcaatctgatttcatcgctgcttggtttgcaggtaatatttggggtgacgaatggccatttgtcattgcatttttaccgtgggtgttgattattattccttacttactatttaaatcgaatacactaaatattattcatacgggtgataatattgcacgaggtctaggtgtaaggttaagcagagaacgtttaatattattctttatcgcagtgatgttatcatctgctgctgtagcagtagcaggttcgatttcgtttatcggattaatgggtccgcatattgccaaacgtatcgttggaccacgtcaccagttgtttttaccaattgccattttagtaggggcatgtttacttgttatagctgatacaattggcaaaattgtattacaaccaggtggggttccagcaggtattgtcgtagcaattattggtgcaccgtatttcttatatttaatgtacaaaacgaaaaatgtatagtgtcaaaggacacaacttattgctatgaaaggcactttattataaggcttttcatagcattttttatttaatgagccactcaagactatttattttttcaataatgaaccattaagttatcaagaggatcttatcaaaaatatatttgataacggtatcaggttaattctttatgatagcgcattcatttattctgttttatactatgactgataataccaaggaggtacaacatgatgaaaaagttaatcaataaaaaagaaacatttttaactgatatgcttgaaggattgttaattgcgcacccagagttagatctgattgctaatacagttattgtaaaaaaagctaagaaagaacatggtgtagcaatagtctctggaggtggaagcggacatgaacctgcgcatgccggttttgttgcagaaggtatgctagatgcagcggtttgtggcgaagtatttacatcacctacacctgataaaatattagaagctattaaagcagtagatactggtgatggtgtattactagttgtaaaaaactatgcaggtgacgtgatgaatttcgaaatggcacaagagcttgcagaaatggaaggtataaatgttcaaactgttattgttcgtgacgacattgctgtgacaaacgaagtacaacgtcgtggtgttgcaggaacagtgtttgttcataagcttgccggttatcttgctgaaaaaggttattcattaacagagataaaatcgcgtgtagaagcgttgttacctgaaattaaaagtattggtatggcaattgagccaccgcttgttccaactactggaaaatatggctttgatattgaagacgacaaaatggaaatcggtattggtatacatggtgaaaaaggtattcatagggaagaagtaaaggatattgatcatattgttggaacattgttagacgaattgtataaagaagttactgccaatgatgtcatattaatggtaaatggtatgggtggtacgccgttatctgaattaaatatcgtaactaaatatattcaacaaaatttagctgcaagaacggttaatgttgctaaatggtttgttggtgattatatgacatctttagacatgcaaggtttttctataactatcgtgcctaataaaccagaatatttggaagcatttttagcaccaacaacaagtcaatactttaaataagaagtgaatatgaataaatatacatttatgaggtggcacaaatgaaagtgaatgatatgaaagcacgtttattaaatttagaagaaacgtttaaaaaacatgaatctgaattaactgaattagatcgagcaattggtgatggtgaccacggggttaacatggttcgtgggtttagtagtcttaaagacaaacttgatgatagctcaatgcaatcattgttcaaatcgactggtatggcattgatgtcaaatgttgggggtgcatcaggaccactgtatggctttagctttgttaaaatgtctgcagtcaccaaagatgatatggataatcaagatttcattacactaattcaggcatttgccgaagcggttgaatcacgtggtaaagttactttaaatgaaaagacaatgtatgatgtagtagcgcgagcagcagagaagcttgaaaatggtgaaactttaacattcaatgatttacagcaattagcagataatacaaaagatatggtagcaacgaaaggtagagctgcatattttggagaagaatcaaaaggttatattgatccaggtgctcaaagtatggtttatattttaaacgctttgattggagatgaagataatgcctaaaattatacttgttagccacagtaaagaaattgcaagtggtacaaaatctttgttaaagcaaatggcaggtgacgttgatattataccaatcgggggattaccagatggttcaattggaacttcatttgatatcatccaagaagttttgactaaattagaggatgatgcattgtgtttttacgatattggatcttcagaaatgaatgtagatatggctattgaaatgtatgatggtaatcatcgtgtgttaaaagttgatgcaccaattgttgaaggcagttttatcgcagcagtaaagctatcaatcggcggttcaattgatgatgcattagcagaaatcaaacaatcattttagttaaaatttactaataatgaaaaatgtaaacctttttcaaatgaaactttataaaaaatatgatagtatatatgtaaatgtttaataaaatctggagaaataggaggacattgccatgcaacaccttataaaaaaacatgtattgaatggcgagtttgatttagtacgacaattgatgtccgaaacagattttatggaatttgaagaagcatatatttcaagtgcgcatgaagtagaaagtatgatgttttatacatgtattttagatatgattaagtacgaagaatcatctgaaatgcatgacttagcatttttattgcttgtgtatccactaagtgaatatgaaggtgctttggattctgcttattatcatgcagacgcttccataaaacttactgacggcaaagaagttaaaagtttgttacaaatgttattattgcatgcgataccaacacctgttatttcagataagaaggcttttgatatcgccaagcaaattttaaaattagatcctaataataatgttgctcgtaacgtcttaaaagacactgccaaacgtatggacaacgttgttgttgatataaatgaattacaccaacgtaatgcacgttaattacatttcaattatattagcttaataatagttttaacatttggttgggttgggacatatgttccagccttttttaatacttaaaaactaacgaagtatacttgtgtgcacaaatggtttttatacaacattttataaatttatacattttaataaagaacatacgatagatggtttaaaccttgttaactgagaaattttgatatgtattcttcgaaatttaactaaatatacgaaattcaagaagcacaataattaatcatttttcctatacaaaagttcgtatgactgcattataaaagcataaatttataatttttttaaatgtcattgaacgtgataatgtgaatggattgagcaattttgaaaaagtgaaaaataacctatgcgacttgcaattaattttcagtacgttataatgcacactgtgcaaaattaaggaggtctattattcacatgatgatgaataaagaagcaacaaaaattggatttgcctacgtcggcattgtagtgggcgcaggattttcaactggacaagaagttatgcaatttttcactaaatatggcttgtgggcttatttaggtgttattatatctggttttattttagcttttattgggcgccaagtagcaaaaattggtactgcctttgaagcgacaaatcatgaatcaacattacaatacgtattcggtgaaaagtttagtaaagtctttgattatattttaatcttcttcttatttggtatagctgtaaccatgatagctggtgcaggcgcaacatttgaagaaagttataacatacctacatggctaggtgctttaattatgacattagcgatttatattacgttgctattagactttaataaaatagtacgtgcactaggtatcgttacaccatttttaattgttttagttgtattaatcgctggcgtttatttatttaaaggtcatgtttcattagcagaagttaaccaagtagtgcctgaagcaagtatttggaagggaatctggtttggtacaatatatggtggattagctttttctgtaggttttagtaccatcgtagcaatcggtggggatactgaaaagcgtacagtgtcaggtgcaggcgcgatgtatggtggtattatctatactgtattactagcattgatcaactttgcattgcaaagtgaatatccaactattaaaaatgcctcaattcctacattgacgttagcaaataatatccatcctttaatagcaacagtgttatctgttattatgctggcggttatgtataatactattctaggactaatgtattcatttgcagcacgttttacagaaccatacagtaaaaattatcatatctttattattataatgatggtagcaggttatttattaagtttcgtaggatttgctgaattaattaataagttatatacaattatgggatatgtaggcttatttattgtagtagctgtaattattaaatatttcaaacgtaaaaatgcggataaaaaacatattgcttaatatcatatgagggatatccgaaactttacaattgaatcactttgttttaaccttaaaagcaattcgtctctactcttatcgggcgaattgctttttatatttattcagtctattaatatgagcgtctaacaaatagagaggtacgatgtaatgaataaagataataaatggacgatgataactgcgctttttataactgtaatcagtgtattgttagcatttcatctgaaacaacattatgaccaaattacaaatgagaaccatgctaataaagacaaaattaatattaaaaataaaaatgtgcgcatttatcaaaaccttacatacaatagagttttccctaacagtaaattagatattattacacctgttgatatgtcttctaatgccaaactgccagttattttttggatgcacggtggtggttatattgcgggtgataagcagtataaaaacccattattagcgaaaattgctgaacaagggtacattgttgtgaatgtaaattatgcattggcgccacaatataaatatcccacaccattaattcaaatgaatcaagcaactcaattcattaaagaaaataaaatgaatttacctattgattttaatcaagtaattattggcggtgattctgcaggtgctcaattagctagccaatttacggcaatacagacgaatgatcgcttaagagaagccatgaaatttgatcagtcattcaaaccatcgcaaattaaaggtgctatactatttggtggtttttataatatgcaaacagttagagaaactgagtttccaagaatacagttatttatgaaaagttatactggcgaagaagattgggaaaagagttttaaaaacatttcacaaatgtcgacagtaaaacaatcgacaaaaaattatccaccaacatttttatctgttggagatagcgatccattcgaaagtcaaaatatagaattcagtaagaaattacaagaattgaatgtaccagtagatactttgttttatgatggtacgcatcatttacatcatcagtatcaatttcaccttaataaacctgaatcgatagataatatcaaaaaagtgttacttttcttaagtcgtaatacatcttctagtggtattcaaactgaagagaaaccacaaatagaaaatccgagtaatgaattaccgttaaatcctttaaactaatgataaacagtagtaatttattacttaagcaacatttaagatcttcaaattgaaaacgaagaatttaaaacatgtggggctaatgtgtaagagtctgagatataataaattgttagcggttctttatcatttctatctcaccctattatgatgtgacatttattttacaaactaatttgttttgaacctgaaaataactttttacaactaaattgtcgaaaaacagtgtgtacatgatataataaatttataaattgaaaagaattcaaaagaaaaaataaaatatagattgagcacgaagtgatttgaaataaggttgtgaaagggaatgacaaggtcagcattaaaaccatttaaaaataaacgcgttatggttactggacgtatacaacgtgttttgtttaaaaattatttagatagacatagcacatttaagccgaatgtaaggatattattaaaagatgtatttgtttcaggtgtatcaatagatcatttatggttatatgagacaaataaatactatgcattggcaatggaacttattcatcaacgagtaaaatttagtgcgaatgttgtaccatattacaaaataaatagaaataataatttattcgtacaagattatggaattaagcgtaaaggtaggttaattactgaagaagcttacaatcaaaacaatcagtatcaggataagatatatgaaaaattaccggatatagattttagactcgaagatttttatagtaaggaaaactaaacaacatatataaagcaccactaatcgtagttgatagttgatcaattacacattagtggtgctttattttgaatttaaatttgataaatgaataagagtatacgcattcatttaagattagatgacattgataagtatgagtaatgtattaggtaaccattaaattcgttgttatgcgattctgatacaagattatgataaaatagctttaattaagaattttagccatcatatagtcatcgtaatatttaccatcgataaataacttatcttttaaaacgccttcgatttgaaaatcggcacttttaaaaagctcgagggcaggttggttattgagtggtacatttgcttcaattcggtgtatttgattgtttaaacaccaagccataatggcatcaagaagtgcttggccaattccacgatgttgatataatttctttacacctaaatcaattttagcaacatgtttaatgcgttgaaatggtgtcgtattaacaaaggcaaagccaacgagttgttcatcactttcagcaacaaagatgactttatgtggagaagtgatatattcttctaattgtttactagccgacgtgacgctaggatcatattctcctggtgtgtagaacatatacggagattcgtcgtatattttcgctaacattgaaatgaaattttctacatctttgatactaactctacgtataatatgggccataaaaagcctccagtattttgaaattttaaaacatttgctactattataatatatatgtaactaaaaggtggagtaatatgttttttggttacagtttaaaggagtattttagatgaaacctaaagttttattagcaggtggaacaggatatattggtaagtatttaagtgaagtgattgaaaatgatgctgaactttttactatatcaaaatatccagacaataaaaaaacagatgatgttgaaatgacttggattcagtgtgatatatttcattacgaacaggttgttgcagcaatgaatcaaatagatattgctgtattctttatcgacccaacaaagaattctgccaaaataacacaatcatcagcaagagatttaacattaatcgcagcagataattttggtcgagcagcggctatcaatcaagtaaaaaaagtaatctacatacctgggagtcgttatgataatgaaacaattgaacgcctaggtgcatatggcacacctgtagaaacaacaaatttagtttttaaacgttctttagttaatgtagaattacaagtttcaaagtatgatgatgttagatcaacgatgaaggtagttttaccaaagggatggacattaaagaacgttgtaaaccattttattgcatggatgggttacactaaaggaacttttgtgaaaacagaaaaatcacatgatcaatttaagatatatattaagaataaggtgcgaccgctcgcagtatttaaaatagaagaaacagctgacggaataataactttaattttattgagtggaagtttagtgaaaaaatacacagttaatcaagggaagttagaatttagattaatcaaagagtcggcagtcgtttatatacatctatacgattatatccctcgattattttggccgatttattactttatacaagcaccaatgcaaaaaatgatgattcatggctttgaagttgactgccggattaaagattttcaaagtcgattaaaatcaggagaaaatatgaaatatactaaatgatattgggtgatatggatgcaaatactactagtagaagatgacaatactttgtttcaagaattgaaaaaagaattagaacaatgggattttaatgttgctggtattgaagatttcggcaaagtaatggatacatttgaaagttttaatcctgaaattgttatattggatgttcaattacctaaatatgatgggttttattggtgcagaaaaatgagagaagtttccaacgtaccaatattatttttatcatctcgtgataatccaatggatcaagtgatgagtatggaacttggcgcagatgattatatgcaaaaacctttctataccaatgtattaattgctaaattacaagcgatttatcgtcgtgtctatgagtttacagctgaagaaaaacgtacattgacttggcaagatgctgtcgttgatctatcaaaagatagtatacaaaaaggtgacgatacgatttttctatccaaaacagaaatgattatattagaaattcttattaccaaaaaaaatcaaatcgtttcgagagatacaattatcactgcattatgggatgatgaagcatttgttagtgataatacgttaacagtaaatgtgaatcgtttacgaaaaaaattatctgaaattagtatggatagtgcaatcgaaacaaaagtaggaaaaggatatatggctcatgaataatttgaaatgggtagcttattttttgaaatctcgcatgaactggatattttggatattgtttttaaacttgcttatgttaggcattagtctaatcgattatgattttccaatagacagtttattttatattgtttctttgaatttaagtttaacaatgatttttcttatattgacatattttaaagaagtaaaattatataagcattttgacaaagataaagaaatagaagaaattaaacataaagatttagcggaaacgccatttcaacgtcatacagttgattatttatatcgtcaaatctcagcgcacaaagaaaaggttgttgagcaacagttacaattgaacatgcatgaacaaaccattacagaatttgtgcacgacataaaaacacctgtgacagccatgaaattattaattgatcaagaaaaaaatcaagaaagaaaacaggcattactatatgaatggtctcgtataaactcgatgctggatacacagctgtatattactagattagaatctcaacgcaaagatatgtattttgattacgtgtcacttaaacgcatggtcattgacgaaatacaattaacaagacatattagtcaggttaaaggtattggttttgatgttgactttaaagtggatgattatgtttatacagatataaaatggtgtcgtatgattattagacaaattttgtcaaacgcattgaaatatagtgagaattttaatattgaaattgggacagaattaaatgatcaacatgtttcgttatatattaaagactatggcagaggtattagtaaaaaagatatgccgcgaatatttgaacgaggatttacgtcaacggctaacagaaatgaaacgacgtcttcaggtatgggtctatatttagtaaatagtgtaaaggatcaattaggtattcacctgcaagtcacgtcgactgttggtaaggggacaactgtcagattgattttcccattacaaaatgaaattgttgaacgcatgtcggaagtgacaaatttgtcattttaaacatgcgttttgttacttagaattgatacatcaatgcagcttcaacgttataataagatagatgttagtcatatgttaaattgaagatacaagtgccaaagcctaaaggaaatgaagttaagataaattataggagtgttaaagtggcaattttagaagtaaaacaattaacaaaaatatatggaactaaaaaaatggcacaagaagtgttgcgagatatcaatatgtctattgaagaaggcgagtttattgctattatgggtccctctggatctgggaaaacgacattattaaatgttttaagttcaattgattatatttcacaaggttctattacattaaaaggaaaaaaattagaaaagctttcaaacaaggaattatctgatatacgcaagcatgatattggttttatttttcaagagtataatttactgcatacattgactgttaaagaaaacataatgttaccactaacggttcagaagttagataaagaacatatgttaaatcgttatgaaaaagtagcagaagcattaaatatattggatattagtgataaatacccttctgaattgtctggtggacaaagacaacgaacatctgctgcaagagcgtttattacattaccttctattatatttgctgacgaaccaacaggtgcactggattctaaaagtactcaagatttattaaaacgattaacaagaatgaatgaagcatttaagtctacaattattatggtaacgcatgatcctgttgcagcaagttatgccaatcgagtagtgatgctaaaagatggtcaaattttcactgaattataccaaggggatgacgataaacatacctttttcaaagaaataatacgtgtacaaagtgttttaggtggcgttaattatgacctttaacgagataatatttaaaaatttccgtcaaaatttatcacattatgccatctatcttttttcattaattacgagtgtagtattgtattttagctttgtagcattaaaatacgcgcataaactaaacatgacagagtcatatccaattattaaggaaggctcacaagtcggaagctactttctatttttcatcataattgcatttttgttatatgccaatgtgttatttattaaacgacgaagttatgagcttgcattatatcaaacattaggtttatctaaattcaacattatttatatactaatgctcgaacaattactaatatttataattacggcaatattaggtattattattggtatttttggttcaaaactgttattaatgattgtctttacattattaggaattaaagaaaaggttccaattatttttagtttgagggcggtatttgaaacattaatgttaatcggtgtcgcttattttttaacctctgctcaaaattttatattagtgttcaaacaatctatttcacagatgtcaaagaataaccaggttaaagaaacaaatcataataaaattacatttgaagaggttgttttaggcatcttaggtatagtattgattaccacaggatactatctatctttgaacattgttcaatattatgattctatcggtatacttatgtttattttattgtcaactgtgattggggcatacttattttttaaaagctctgtttctctagtttttaaaatggtgaagaagtttagaaaaggtgttataagtgtaaatgatgtcatgttctcatcatctattatgtatcgtattaagaaaaatgctttttcacttacggtcatggcaatcatttcagcgattactgtttcagttctttgctttgctgctataagtagagcgtccttatcaagtgaaataaaatatactgcaccacacgacgttacaattaaagaccaacaaaaagctaatcaattagcaagtgaattaaacaatcaaaaaattcctcatttttataattataaagaagtaattcatacgaaattgtataaagataatttatttgatgtaaaagcgaaagaaccatacaatgtaacaattactagtgataaatatatccctaatactgatttgaaacgtggacaagctgatttgtttgtagcggaaggttctatcaaagatttagtgaaacataagaagcatggtaaagcagttataggaacgaaaaaacatcatgttaatattaagttgcggaaagatattaataaaatctattttatgacagatgttgatttaggtggaccaacgtttgtcttaaatgacaaagactatcaagaaataagaaagtatacaaaagcaaagcatatcgtctctcaatttggattcgatttgaaacataaaaaagatgctttagcattagaaaaagtgaaaaataaagttgataaatctattaaaacaagaagtgaagcgataagctcaatatcaagtttaaccggaatattattatttgtaacatcatttttaggtattacattcttgattgctgtatgttgcattatatacataaagcaaatagatgaaaccgaagatgagttagagaattatagtattttgagaaagcttggatttacacaaaaagatatggcaaggggactaaagtttaaaattatgtttaattttgggttacctttagttattgcactatcacatgcatattttacatcattagcatatatgaaattaatgggtacaacgaatcaaataccggttttcatagtaatgggattatacatttgtatgtatgctgtttttgcagtgacggcttataatcattccaagcgaacaattagacattccatataaaatatacagatggctttcagtagagtagtggattcggattcacgaactatactggaagctttttattataaatgaagagaagttatatttttagcatgtatagttgaatactgggttaaaataccatattaataatgaagtaaaggtatgagtgattatgaaagtgttttgaatgaaatatatttaattggtgatgcttttaattgaaaagattaacaggattcaactttgtaaattgtattaaatgtgagaaaataaaagtatattcattgagagatatatgagtcaatgatcgttttaaacaagataagtgtattttaatatgtaaaagttatgtaataaatattgtatcgttgcaaatttcccaactatatccatttacaatttttagagttgtatagataaaaaattgcctatacaataactttttcaaaacaaatgcctactactatttaaattttatgtaaaagttaagtttcggaattgttaaaaatttgtaaattgaattgtgggattgtaaattttgtgctattttcatataagggcaaatacagtaaattgtttactgtgaggcatttttgaaattaatatcagtacactaaaattatactgacgattgataataacaaatttgtatcattagtttgtaaattcacttgtcttaatttgaaacaaattataactgaatgtgattggtgacaatcgcttaaatggaggattttaaatgtttagtaagaaaaaagataagtttatggttcaattagaagagatggttttcaatctggatcgtgctgctattgaattcggtaaaatggatttcaatacacatttagatttaaaagcatactcagacaacattaaaacttatgagtcacatggtgacgaattagtacatcaagtaattactgatttaaatcaaacatttatcacaccaattgaacgtgaagatattttatcattatgtgatgcaattgatgatgttttagatgcaattgaagaaacggcagctatgtttgaaatgtattcaatcgaatacacagatgaatatatggctgagtttgttgataacattcaaaaagcagttgcagaaatgaaacttgctgtcggcttattagtcgataaaaaattatcacatatgcgtattcattcaattaatattaaagaatttgaaacaaactgtgatggtattttaagacagtcaattaaacatattttcaatagcgaaacagatccaatcactttaattaaaataaaagatatttatgaaagcatggaagaaatcgctgataaatgtcaaatcgtagcaaataattttgaaactattattatgaaaaatagctaaggggagtatatatttatgtcatatataatcatcgtcactatagctgtagttattttctcgctgatatttgactttatcaatggattccatgatacagccaatgcagtagctactgctgtatctactagagcgttaacgcctaaaacggcaattttaatggcagcagtgatgaactttataggtgctttaacatttacgggcgttgcaggcaccattactaaagacattgtcgatccatttaaattggaaaatggattagttgttgtgttagctgcaatacttgcggctattatttggaatttagctacttggttttacggaattccaagttcgtcttcacatgcacttataggttcaattgcgggtgcagcaatcgcatctgaaggctcatttggagtgttacattaccaaggtttcacaaaaattattattgtattaatcgtttcaccgataatcgcattttgtgttggtttcttgatgtattcaatttttaaagttatctttaaaaatgcaaatttaacaagagcgaatcgtaactttagatttttccaaattttcacagcagcgttacaatcattctctcacggtacgaatgatgcgcaaaagtcaatgggtattattacgttggcattaattgttgctaatgtacagaatgatggcagcgttgaaccacagttatgggtaaaatttgcctgtgcgacagcaatggggcttggtactgcaattggtggctggaaaattatcaaaactgtaggtggtaatattatgaaaatacgtccagcaaatggtgctgcggccgatttatcatctgcattaacaatttttgttgcatcatcgctacatttcccattatcaacaactcacgttgtgtcatcatcaatcttaggtgttggtgcttctaaccgagctaaaggtgtaaaatggagcactgcgcaacgaatgatcattacatgggtgattacattacctatttcagcattgttagcaggtttactattctatatacttaacttatttttctaattgaaaataaaactaaactgaacttcagtatcacaaacatatggtggtattgaagttcagttttttatgtaagtagataacatattttatagagtttacgtagaatgaccaagacaaagcattttaattaggggtctaagttataaatttattccatggaacataaacagttaggtcattaaaatataagtaagcgtaaaataatgatttaatagtttatattcttcaatgaaggaataattaaatagttatcaacttgtttaattaacctaaattgtattggactttatttaatataaatttgtatatgtagaagaaaaagcgtaaaatactggtataacaaattaaatcattatatagtcaacttagttgcattattttgatttttaatatattatgcatttaatttaatcaaataggtaggttgttaatttttacctaactaccattcatacaaaatataaatatgtatgatagggaagggtgagataattttttgtaccaaaatgaaaatttttttcaaaaataaaaaactagcaatctcacatgatgtgaattgctagtatatatcagtacaatttatttaattaatggatgaatgcatagctagaaacttctgaagctggaattgtacggtagttcatattgtatggaccatatgtgtaattcatttcagaaatcaagatactaccatcaccattgacacgttcaacataagcaacatgaccatatgggccaggtgtgctttgcataattgaaccaactgatggtgtgttgtttacttggtaaccatcattagctgcgttaccagcccaatacttagcgtctgaccaatatgtgctaattggactaccagcttgagcacgacggtcaaatacgtaccatgtacattgaccagcagtgtataaattttggtgattaaaagatgatgcattgccattgctacctgttgtagctgttggtgttgtaccacctgatccaccattaggaatttgtaatgtttggttaggcataattaaataaccacgtaagttattggctgccattaattgatcaactgaaacaccatatctgctagcaatgatatttaatgattcaccagcttgtacagtatgagatgatgctgaaccagcttgtggagaagtgtttgacgaattttgtgcatcacttccacctactgagataacttgaccagggaataccaagttgttatctaattggttattttgtttaatactctctactgaagtgttgtatttttgagcaatactccataatgattcaccagattgtactgtatgttgtgtagaagcttgtgcatcatgatgcgttaaaaatgcagctgcaccagatgttgctgttattgcaaatgctaattttttcaaagggactcctccttaaaattaagttttactacttttaaaaattattaagacaatttatatagtaaattaagttttcgttttatattacgatttccatattatcaaaaataagtagctttgtgtggtttgttattatcttgtaatattattaacattttaggatagcggttcatatttttataaatgctgatttgatagtgtataaaagcgttttagtgattttaactaattataaaaaattatattttgtaacattgtaaaatgtaaaattactatacttattaaaggttatttcttttgatgaagcaaaatttactgtaaaatttgacgcataaaacgacggtagaaggaggaattattttgtcgcaaaatacaaatcattcatattatcatcaaaaccagcatgctcaatcaataagtaaagtgtggctttattttatgtattattggattatatttggcataggatgctatctaggtcagtttttaccattaagttggcgacaacccttgtcatttggattactgattattattttagcaacacttgtttttgaaagagcgagacggttcggtttaattatttcacatatttacgctgtagtgatcggcttattgtcatacgcaacgtttaccacgtatttacaaaatttaggaccagatattttctataaaaatatcgcattagcaatttttgcatttatagcatttggtattattggttatttcttcgttggagatgcatcgagtataggcaaatatttattcgttacattaataacattaattattgcgagtctaattggtatttttcttcaaaatcctattttttacactattattaccgtcgttagtttgttgttatttctactttatactttgtatgattttaatcgtttaaaaagaggtgactattcaccaagagaaatgggatttaatctatttattaatttgttgaatattattaaggatatactttatcttgctaatatgttcagaagataaacagttaaattaataaagaaatttgtataaagttttggaataatcaataatgaatatcaaccttaaactggagcgattgtcataagttagaaacttagactgagattttactgataaagcaataaaaatatattaccttaattgtaaagatattattaatcattgaaatgattaactgctatagttctaaagtaaacaaatcttagaagataaactttaaacaggtgtacttgcctttctaattacacttttattagaaaagtaaagtatagctacgtattaattttaaaatcgaaacattaataggaagaagtatagataatataaacaatttaatgttagtttgagctcatctcaaaagtagaatgtgatttaaataagtgtttatttttaaattgaaaatgaatatataactaacaaaagataatagtaatacgttgtagatgtggtcatttaaaattattttgaaaatactaaaaagtagtgtgttttcaattggatagtttaattaaactgactacatctatttttgtaatatttaaatgatttatatataagtttaaaaattaaccattatatagttttatttatttttgatttggtattcgtattgtgttaaatttacgtttaattaaataagttaaatattatagggaatgataaaagtggtacttaaatatagaaagaggtaaagttatggcaaaatcatgcttgcatatacttactaataatgaatatgcgacaacgcgttgccaagatggcatagtcttattttggccaattgacggggaaatcgaactacaaaaatttcgtaaaagtaaaataattgaagatgatatatatattattaatcatctggatgtatttagtattaagaataataaaaaaacgatcatgttgtatttgagtagcgattggtttgcggaattaggctttactttctttaattaccactatacagcaaagttgattaaatcatcctataatttgaaatgtctactattaaaattgacatatcgataccttgataatcagcctcttaatgacgctgatattagaaaattacaggatattattaaaatcattgcaaaagaagcaagtatggataaaaagattgcacaaaatcaatatcgatatgcttattatggtgatttgcgtgatgagctcgaatatatttatcaaaatgtaaatcaacgattgacattaaaaagtgtcgctgataaattatttgtctcaaagtcaaatttgtcatcacaattccacttacttatgggcatgggttttaaaaaatatattgatactttgaaaattggtaaatcgattgaaattctacttactactgatagtactattagcaacataagtgaacatttaggttttagtagtagctccacttactctaaaatgtttaaaagttatatggatataacaccgaatgaatatcgtaatttatcaaaatataataaatgtttaatgctaaagccagaaccactagtaggcaaaatggtgcaagaagtaaaagaaatcatattgaattatattgaacattataaaaaccacctaactgatgttatacatattgatgaagacaaatttgaaacacctaaattgtttcaaacggttattcaaataaatacttatacagaaatgaaattagttttcttagaaggaatctttaaaaccttattgaataagaacagtcaagttgtctttttcatcatgccatcgattctaaaaagtaaaaataccatgtccgaagaagaaaaattcacaatcattaaaacaataattgaaagtgatctaaagatagcatttaatataaatgatattgaaacaacttattttgttgaagaagcttttatgagtgttttcagacaaatatctccaaacgaattaagtaatcataataattacgaagtgcattttgtttttgatttatcattgatggaaattagaacaatttatcgaatgatattaaaattacataacatcatgttgaatgtgaaattaggattgaacattacctgtttatttgaaaaaccttcagtttttaaatcactagtatcacaaataaagcgacttaaattcgattcgttaataatagataatgcaaatttaagtagcccttatttgatgggggaaagtgatgagttactattgaaaaatattttgcattttaaaaatttaaaacaagtaattaatgaattggatattgaacaagaaaagcttatttttctaaatgttgaaaatcataaactgcttaataataaagaacgagatttaagtaatagtgctccattaatttataagacattaagtgcgctgtatcacaactttgatggctttggattaaacatttttgataatcatcatacatttaatgcgatgcatctatatgataaaaatggatttaaaacaacactaggtcttatattggaaaaatttatcgaatatgtctcgaaaccaaaatacgaaaacagttattattctatttttgatatagagaattattattgtcttgttatttatgattggcgagtgatagagagcgagacaattatgagtaattttgaggatagtcaagtttatataaattttaaaaacaatgttttaaacgataaatatctaattgtaatagaaacattggacgaaaatagtggcaacattaatcatttgatttctaaagaattaagagataaatatgaatggaaccctagtttactatctaaaattgacaactaccttaaaccagcaatagagattaaagagcataattttagtgataattccttgaatattaacgttacttttaatgcgttatacataattaaaataggaaaaaaataacaccttgatatgtattgcaaaatttaatttgcatttgttggtaattttgacaacgtattaaaaacaaatgagaaagacaatggcaaaaaaatttaagataataatgacagaagcattgtctttatatatttgggggtgcaacattttgaatactgagaaattagaaacattgcttggcttctataaacaatataaagcattatctgaatatattgataaaaaatataagttgtcgctaaatgatttagcagtcttagatttaacgatgaagcattgcaaagatgaaaaagtacttatgcaatcatttttaaaaactgcaatggatgagctagatttaagtaggacaaaattattagtttctataagaagactaattgaaaaagaaagacttagtaaagttagatcatctaaagatgagcgtaaaatttatatttatttaaataatgatgatatatctaaatttaatgctttatttgaagatgtagaacaatttttaaatatttaattgaaattgagtgtcgaaagcatagaatttgcttatcggcacatttttaatttatacatattttaaaactaagtaacagtttgaaggaatcgtagttcaataatgttaattgtgaaaatgtatataaacataaaaaaatcatgtataatatatgttgttaattaaacagttcgaaagcgagatgacattatgggacgtaaatggaataacattaaagaaaaaaaggcccaaaaagataaaaacacaagtagaatatatgcgaaatttggtaaggagatttatgttgcagcaaaatctggtgaacccaatccagaatctaaccaagctttaaggttggtgcttgaacgcgctaagacatattcagtgccgaatcatattattgaaaaagcaatagataaagctaagggtgctggagacgaaaactttgatcacctaagatatgaaggatttggcccaagcggatcaatgctaattgttgatgcgttaacaaataatgtaaatcgtactgcctctgatgtgcgagctgcttttggtaaaaatggcggtaatatgggtgtatctggatcagttgcttatatgtttgatcatgtggcaacatttggtattgaaggaaagtctgttgacgaaatacttgaaacattaatggaacaagatgtagatgtaaatgatgtgattgacgataatggattgacaatagtctatgctgaaccagatcaatttgcagtcgttcaagatgcgcttcgtgcagcaggtgttgaagaatttaaagttgctgaatttgaaatgttacctcaaacagatattgaactttctgaagcggaccaagtaacatttgaaaaattaatcgatgcattagaagatttagaagatgtacaaaacgtattccataatgtggatttgaaataatgaaatcagcagaacaatggattgatgaattgcaacttgaatcacatcctgaaggtggtttctatagagagacaattcgagaagtattgaaagatggacgcagagcgccgtttagtagtatttattttttacttacagatgacaatatttcgcattttcatcgaattgatgctgatgaagtatggtactatcatgctggcgattctctaacaattcatatgataaatccggatggggaatatacgactgcaacattgggtactgatatccaaaatggagatgtattgcaatatgtagtgcctaaaggaacaatttttgcttcttcaatcgaattttcaaatacttatagtttagtaggttgtatgtgtcaaccggcatttgagtttaagcagtttgaattgtttaagcaatctgaattaattacacaatatccgcatcttaaatcagtgattgaaaaatatgctttaaaataaaaatgatcaatgaagtggtttgaaggttgttaataaacctttgagtcacttcatttttgtatgtattcttgattgaatcagaatagaattgatgctacagctgtttttaatgaaaatagcattaaatgattttgaaaacgataagagtgtgttatttatatttttgaaaaatcacttttatgaagaaatgtgtgtactatctaattaatattgtctattttaagtaaattgaagcgagttgtagtaaaataataataaatattttcatatgattaacaaaaactataaaactgtatcatgacatgacatcatttatgtagttttatataataatgacaaggagttggtgactgtgaaagtaaagtatatagataaacgtcactggcgtcgcctaattgatagggaatacacagaggtaaaagttaataataataggtttaagggtattataggcttagtcacgatgaaaaaggttcgtgatcctttagaggtgacggtagttggacaaaatatcattgtcgcagatgacaattataaatggttgcaaatactacctgaaaagaaacgttatagtataactgtaatgtttgataataaaggcaatccattagaatattattttgatataaatatcaaaaatataacgcaaaaaggtaatgcgcgtacagtagatttatgtttagatgttttagcgttaccaagtggtgaatatgagttggtagatgaagatgacttaatgtttgcattagaaagtgagcaaattacaaaaaagcaatttcatgaagcatatatgattgcacatcaaattatggcagagttagaaaatgattttaaaggattccaaaagaaaatcatgtactgctttaataaaattaatgcaaaggctcaaaaaaatcatcaaaagccacaaaataaaactaatattgaaaaaagcaaacaaataaagcctaagcaatataatcaaactaaaaatcaccaacaacaaaagaaaaactaagtaattcaagctgcagccatgccaataaaattggtgaaattattcgttagtaatgaactcttgaatgctcgtagtcatgaaagttcaataattgaataatttatggggggaaattatgaagattgaagactatcgtttactaataacattagacgaaacgaaaacgttacgtaaagcggctgaaattttatatatatctcaacctgctgttacacaaagactaaaagctattgaaaatgcttttggagtagatatttttatcagaacaaaaaaacaattgattacaacaactgaaggaacaatgattattgagcatgcccgtgacatgttgaaaagagagcgattattttttgacaaaatgcaggcacatattggtgaagtgaatggaacaatatcaatcgggtgttcttctttgattggacaaaccttacttcctgaagttttgagcctatataatgcccaatttcctaatgttgaaatacaagtgcaagttggttcaactgaacaaattaaagcaaatcatagagattatcatgttatgataactcgtggaaataaagtaatgaatttagctaacacacatttatttaatgatgatcattattttatttttccaaaaaatagacgagatgatgttacaaagttaccatttatagagtttcaagctgatccgatttatataaatcaaataaaacaatggtataacgataatttagaacaagattaccatgcaactattacagtggatcaagtagcaacttgcaaagaaatgttgattagtggtgtaggtgttacaattttgccggaaattatgatgaaaaatatcagcaaagaacaatttgagtttgaaaaagtagaaattgataatgaaccgctgattcgttcgacatttatgagttatgatccgagcatgttgcaattgccacaagttgattcttttgtaaatctcatggcgagctttgttgaacaaccaaaggcgtagttttagactaatttaaggtttgtatttagttttaaactattcggttaaattgaacgtagttggttgctaatgcaccaacagcaaaagagcccctaattaataaattaaaaggggacaaaggaatacagttggttgctaatgcaccaactgcataagagcccctaattaataaattaaaaggggacaaaggaatacagttgattgctaatgcaccaactgcataagagcccctaattaataaattaaaaggggacaaaggaatacagttggatgctaacgcaccaactgcataagagcccctaattaataaattaaaaggggctctaagaagcggggttatggatatgtttgcagcgttattacaaataaagaattataaactctttgttgctaatatgtttctactaggtatgggtattgcggttacggtcccatatcttgttctttttgcaactaaagatttaggtatgacaacaaatcagtatggattacttctagcatctgcagcgattagccagtttacagtaaattcaattattgctagattttcggatacgcatcactttaatagaaaaattattattattctcgcattattaatgggtgcgcttggtttttcaatatacttttttgtagatacaatctggttattcatattactatatgcgattttccaaggattatttgcaccagcaatgccccaactttacgcatctgctagagaatctatcaatgtttcaagctctaaagatagagctcaatttgccaacacagtattacgttcaatgttctcattgggctttttatttggtccatttattggtgcccaattaatcggtttaaaaggctatgctggattgtttggtggaacaataagtatcattttatttactttagtacttcaagtgtttttctataaggatttaaacattaaacaccctattagtacgcaacaacatgttgaaaaaattgctcctaatatgtttaaagacaaaacgcttttattaccatttattgcatttattttattacacattggacaatggatgtatacgatgaatatgcctttatttgttactgattatttaaaagaaaatgaacaacatgtcggttatttagctagtttatgtgctggtttagaagtgccatttatgatcattcttggcgttttatcatctagattacagactcgaacattgttgatttatggagcgatttttggtggtttattctacttcagcattggggtatttaaaaacttctatatgatgttagcaggacaggtgtttttagctattttcttagcggttcttttaggaattggtattagttatttccaagatatcttaccagattttccaggatacgcctcaacactattttctaatgcaatggttattggacagttaggcggtaacctattaggtggtgctatgagtcactgggtaggtttggaaaatgtattttttgtatcagcagcatcaatcatgttaggtatgatacttatattctttactaaaaatcaaaaaattacaaaagaggatgtgatatcaacatgacaattattttatggctacttatcatcgctgccttcatgttagcatttgttgggttgattaagccgattattccttctgttttagtattatgggttggctttttaatctatcaatttggctttcataatcagcatttatcatgggtgttttatgtatctatggcattgctaacaatattaattttatgtgccgactttttagctaataaatattttgtgaatcgcttcggtggttctaagtttggagagtatgcagctttaattggtgtggttattggatgttttgttttaccgccatttggaattattattataccttttattttggtattcatagttgaattaatacaaggctattcatttgaaagagcagttaaagtaagtataggttcaatcgtagcatttttaacaagtagtatagctcaagcaatcattatgtttataatgattgtatggttctttatagatgctttattgattaattaataaaaagcttattgcaaaatatgtttttcggtaactgtaatttagtgattttatcattaacagtaccaaattcgcatatgatgtaataagctttttgtttataaaaatgtatgagaatgttttttcgaaatatttctttcaatgcgtaatccaataggcataactataaatgaaaatataataaatacccaattgcttacctgaatatatggtccaaaggcaagtaatgattgtggaataaagaatacatagaaaaatcctacaattagtagaatgattgctaaataggtgaatatccatatccaatttgaattgttaaaacactgcagttgtattgttttaaaactaaaccatataaataaaaagacaataaagaatccaacgactactgaaaacgggaatgaaacaaaatataaattacttccatttttttccatgaaaaatcctaaaaatcctttgagaaaactaacaatcccaattaatagaacgatgtgttgatagatatatttaaaaatatttttaaatgtttcattaggcatcgcttttagttcttttattgcatgtgcttttgggtcgtgattgaaaaaatctaaggctaataaaccatgttgttctgcgcttaataattgtttgagtatacggttaataattaactctgtatcatgagggttgacgcgaaagtcagagcgcatataagtcatataattctcgaagatttctctatcagtattgcttaatcttaatgatttaacattattttcttttgttaattgcgcagtacttttcattgttacttaagcgctcctttaaaaatgtttaattccaaattaaaatggaaatgattttatagtattaataaggtcaatcatatcatattaaacgcataaatataacgattaatattggagaggaaaatgaggacacttaataaagatgaacataattatatcaagcaaatagctaatatacatgagacattattgtcgcaagtagaatccaactataaatgtactaaactgagtattgctcttaggtacgagatgatatgttcaagattagaacatacaaatgataaaatttatatatatgaaaatgaaggtcaattaatagcgtttatttggggacattttagtaatgaaaaaagtatggttaacattgaactgctatatgttgaaccacaatttcgcaaactgggaatagctacgcaactgaagattgcgcttgaaaaatgggcaaaaactatgaatgcaaagcgaataagcaatacaattcataaaaataatttgccaatgatatctttgaataaagatttaggttatcaagtgagtcatgtgaaaatgtataaagatattgattagaattaggattatgttgctaattcatgttaaaattaaaaaagatttaatgacgttaaggagttttatatgaagaaattaatcatcagtattatggcggtcatgctatttttaacaggttgtggtaaaagtcaagagaaagccactctggaaaaggatatcgataatttacaaaaagaaaataaagaattaaaagacaaaaaagaaaagcttcaacaagaaaaagaaaaattagcagataagcaaaaagaccttgaaaaagaagtgaaagatttaaaaccttcaaaagaagataacaaggatgataaaaaagacgaagacaaaaataaagacaaagataaagataaagaggcatcacaagataagcaatcaaaagatcaaactaagtcatcggataaagataatcacaaaaagcctacatcagcagataaagatcaaaaagctaatgacaaacaccaatcataatcgaattgcttacttgttatagatgaaaggtacagcgttttaaaccttattttaagggtatgtattaattaaaatgtggtcatgattgaaacagaacgtaaaaatagacaacgtaattaataaaggagagaaacggcatgcatgaacaagattttagaattttagagggtcaagatattactttgccagaattaggtagagaattagaaaatattacaggacatacgattgctgattctactggcgaaattaagcgtgtaattgcacatttaccaaactttgagtccgatacagatacttttgttgctacatatcgtttaaaccatcaacaagattttatagatgcaacttttactgcgctgaaatcagatagagcacgtttaaaagaagtgccagttcatgttgaacttataagttatatttctaaatcaaaataaactgctatctaaaacgcaaagttgatcaaaatatcgattttgtgttttttattgagaaattatataggagtgtcaatcgatgatttattgtgaaacagagcgtttaatattaagagactggcatgaagatgatctgttaccttttcaaaaaatgaatgcgaattatgacgtacgtaaatattttccaagtttattgagttatcgtcgttcagaattagatatgagaactatggatgcggttattaaagattatggcattggattatttgctgtagaagataaagagtcccatcaatggataggctttataggtttgaattatattccagaaacaagcgattatccatttaaagaattaccgctttatgaaataggttggcgcttgttgccagaattttggggaaaaggattagcaactgaaggcgcaaaggcaacattgaagttagcagaagaacatcaaatatacgatgtctatagttttacagcagaagcaaataaagcttcacaacgtgtaatggaaaaaattggcatgacagtgtatgatcatttcgaattacccaatctaagtaagtatcatttattaaaaaggcaagtgcgctattacattaatcttcgaaagtgaaaaatttatacataagcgtaacaaacacccctaacattgtttagctgatgataacaatattaggggtgtttgtttattttttaaccttagaatgattaatcgtatgaacgagtacccagaggtttgaaatttaatattgattcaattaatgattccttagtgtcgcataacggtgcaagagcacgatacttaggatcaataaaaccttcctcaatcatatggtcaatcattgtttgtagtggattgaaaaagccattaatattataaatggcaataggcttttcatggatacctatttgagcccaactatacatttcgaaaaattcttctagtgaacctgcgccaccaggagccatgacaaatgcatctgcaagttctgccattttatttttacgttcatgcatagaatcaactaaaattaattcagttaaacgttggcttgtgatttcatgttcatctaacattttaggcatgacgccaatagctttgccgccatgatctaatacaccatcttgaatggcacccataatgccaattgaccctgcaccaaatactaattcataaccttgttcagcaaaatatttacctaaatcgtatgctttttgtacatatgaagggtcatgacctttgcttgcaccacaataaactgcgattcgtttcatgttaatccagctccttaattcgatgaatgacttttaatagtgattgttcaaacactttttgatcttgctttgtaaaaggtgggggacctttgtggcgaccaccttgttttctaatttgtgcattcatatatcgtttatctaatagttgttgaatatttttggaattgtatatcttcccattatgatgcatgacaattaagactttgtcgactaataaacttgcgagtccataatcttgagtgactacgatatcatccttcgttgataattgaacaattttgtaatcaactgcatctggtccatcatcaacatataatgttgatacatgtggaggatataattggttcgaaaaatggctgaagctccgaataattgtcacaaaaatgcctgtctcagttgttaaatctataatagaatcaacaacaggacaagcatctccatcaataataatatgtgtcacaattatgcctctgtattgttttctttattttgttgagaggcgcttttggcaacataatctttatattttttaaatgacttgatgcgtgctttatcagcttcttgttggcgtttttgttcttctttgtgtcgtttttcaatatttttttgtaactttttattcattttagcgatttctttgcgatttttttcagctagtttatcgccttttttctcagttttctcatctaatttattaggtgttaagcctgctttttcttcgtatttttgtgattttttcatatctttaatacgttgtatttcattcttttcgcgggctttttgctcttctttatgacgcttttcgatatttttttgaagtattttattcattttatcagcgtctttacgattttgtttagctaatttttcgccttttttctcaatataggcaggatcatgttctctagcaaactttttaagttcacgtttattttcaaaatcttgttttttatcgccgacatattctttaacatcactcgctgtgttactgattgctgcagatgtttttgaagcaactttacttgtagcatctgtaactttttgtacgtccggatgttgtttgatacgtttacgttcaacaattaacggtaccaatacaattggtaatacattaatcataaatttgatgacttttttcttatccatagatcttgcctccataattactttattaattttacataccctatgatacatcaatataaacgatgatagtagtgaatcactattaagtatttcagatcttttttaaaagaagacaataaaaactgccaatcaagtggttccttaattgacagtctatattttaaaaggaaattaaatacctttaccaatgccaaatccgaagtaaagtatagcaataaagattactaatacaattctgtaaatggcaaatggaattaatttgattttgttaattagatgcaagaatgttttgattgcaattagtccaacagtaaatgcagctaaaaagcctaaaatataaaaaggtatatcagtaatctgaatatcttgataatgttttaataaagataaaccactagctgctaacataattggaacagccataataaatgtgaagtccgatgctgctttatgatttaatttcattaataccccagttgaaattgttgagcctgaacggctgaaaccaggccacatagctactgcttgagagataccaattacaaacgcttggaaataattgatttgatccactgtttgtgggtttttaactttagctgagtatttatcagcaataatcatatagatagcacctacgaataagccaatcataacagttggcacactaaataaatgttcttcgatgaaatcatcaaatagtaagcctaaaatacctgctggaaccatacccactaatacatgtaataaatttaaacgtcttggctttgaacgtctttgttgattgttatctccttcaacatgtttgtgtttaccaatatgtaaaatctctaagaagcgttcgcggaacacccatgctgctgcaaagacggatcctaattggatgacgattttaaatgtaaatgctgattgagaacctaaaaattcagatgattttaaccacatatcatcaactagaatcatatgtccagtagaggaaacaggtgcaaattctgttaatccttcgacgacccctaagataataccttttattaattcaatgataaacataatgtacccactttcattactcaatttaatttatttaaatatcaaaattaccatatcatgatagcatattcatttaaagacatgctagttatagttataatactagactaaagatgtatatattcattttcttttacatgtaaaactacaatattttattgagctatttaatttgattttaaggaaaaccttttataataggtttaggtgatataattgtgaaaaaattaacaataatactgtttcaatataaaatttttccggtactcatgttcttggtcagtactggtctcggcatactcgttataacgcaaaatattttaatagcagattttttagctaaaattataagacatcaatttcaaggtttatggattgtattatttattttattaggtgttttacttttaagagcaactgtgcaatttctaaatcaatggttaggtgatacattagcatttaaagttaagcatatgcttagacagcgggttatttataaaaataatggtcatccaatcggtgaacaaatgactatactcacagaaaacattgatggtttagcacctttttataagagttatttgcctcaagtgttcaaatcaatgatggttccgctcatcataatcattgcaatgtttttcatccatttcaataccgcattaattatgttaataactgcaccatttattcctttgttttatattattttcggtttgaaaacgcgagatgagtcaaaagatcaaatgacttatttgaatcaatttagtcaacggtttttaaatattgctaaaggtttagtgacgttaaagctatttaatcgtacagagcaaacagagaagcatatttacgacgatagtactcagtttagaactttaacaatgcgcattttacgcagtgcttttttatcgggattaatgctcgaatttataagtatgttaggtattggattggttgcattggaagcaacgctaagcttagtagtatttcataatattgattttaaaactgcggcaattgcgattattttagcgcctgaattttataatgcaattaaggacttagggcaagcgttccatactggaaaacaaagtgaaggtgccagtgacgttgtgtttgagtttttagaacaaccgaacaataataatgaatttctattaaagtatgaggaaaatcaaaagccatttattcagttaacagacatatcatttcgatatgataattctgatagattggtattaaatgatttaaatttggaaatatataatggtgatcaaattgcacttgtaggtccaagcggggcaggtaaatccactttgacacatctaattgcaggtgtttatcagccaacaataggtactataagtacaaaccagcgtgatttaaatataggaatacttagtcaacagccatatattttcagtgcttctataaaagagaatattacgatgtttaaagatatagaaaataatactattgaagaagtgctagacgaagtaggtttattagacaaagtgcaatctttcacaaaaggcattaacacaataataggtgaaggaggcgaaatgttatctggtggacagatgagacgcatagaactttgccgtcttttagttatgaagccagatctcgttatatttgatgagcctgcaactggtttagatattcaaacagaacacatgattcagaacgttctgtttcaacattttaaagatacaacgatgattgtcattgcacatagagataatacaattcgccatttacaacgacgcttgtatatagaaaatggaagactgattgctgatgatcgcaatatttcagtaaatataacagaaaatggtgatgacttatgaaaacacgactaaaatttcaagtagataaggatttattgttagctatagttgttggtgtttgtggaagtttagttgcgctcgccatgtttttcttaagtggttatatggtgacacaaagtgcacttggtgcgccactatacgctctgatgattttagtcgttacagtaaaattgtttgggtttttaagagctattactcgatacgtagagcgccttatttctcataaagctacatttacaatgctacgtgatattcgggtacagtttttcggtaaattagtaaatgtcattcctaatgtttaccgtaaactgagttctagtgatttaatttcacgtatgattagtcgtgttgaggcattacaaaatatatatttacgtgtttattatccaccagtcgtcatcggtttgacagcgctagttacagtcatagttttggcgttcatttcaatcggccatgcgctattgattatggttagcatgttgtttactttactcgttgttccttggttaagctcaaaaaaagcacgtactttaaagaaacatgcagctaatgaacaggcccgatttttaaatcatttttatgattataaagctggtatggatgaactacgtcgatttaatcaaattaatcattatcgagataatttgatggctaaattaaatcattttgataaattacaacttaaagagcaacgctttttaacgatttatgattttatattaaatattattgctatgctttcgatttttggtagtttagttctaggattaattcaaattaatgcaggccaactaaatattatttatatgacgagtatagttttaatggtcttaactttatttgaacaagctgtaccaatgacaaatgtcgcgtattataaagcggatactgaccaagcattgcatgatattaatgaagtgatatctgtaccttctactaatggaaaaaaccgtcttaatgataagtatgatgcaacgaacatttatgaagttaaggacgctagttttaagtattggaaccagcaaacgtatgtgttgtcggatattaattttaatgttaatagaggcgaaaagattgcgattgtggggccttctggttcaggaaaaagtacattactacaaattatggctgggttatatcaattagatagtggctctattcgtttcgaaaatatggatatgtttgaaatagatgacaaagataagtttgaatcgttaaatgtcttgctacaatctcaacaattatttgatggtacaatacgtcaaaatttatttaccgatgaaaaagatgaagcggtgcaagcaatatttaagcaattagatttagaacatttggcactagaacgtcaaattgacttagatggtcatacattatctggcggagaaattcagcgtttagcgattgcaaggatgttattaaaagatactgcatcaacatggattttagatgaaccaacaactgcattagataaacaaaatagtttaaaagttatggatttaattgaagcacatgcagaaacattaattgttgctacacacgatttaactttattgtcacgttttgagaccatcattgtgatgataaatggtaaaatagttgaaaagggaaactatcaacaattactcgctaatcaaggtgctttatggaatatgattcaatataatgcataaaaaaactgcttgataggctaagaaacctttcaagcagttttttaactaacaagcttacgcgtgctaattgtttttctattcttaataaattctaaacattactttaattgtcatgacaaaagttaattatttttcctttgtttcatcaaatgcatgaatgactttacctaataagcgattaagttctttaacttcatcttgagataaagaagaagctgaagcgactttgtcagatgcattacttaattctggtctaatagtttcacttttgtcagtcaagtgaataaatacttcacgttgatcgacttcggaacgttcacgcttaattaagtctacttgttccattcgttttaataatggtgatactgtaccagtatcgagtgctaattcagttacgactttcttgacgtttacaggagattcatcccataaaattgttaagacaagaaattgtgggtatgttagattgtacttcttaaaaactttgttagagtagtagcgattaacttgtctttgagcattgtacaaactaaagcatagctgttcttttaaattatgttgatcagacattaaagttctcctccagacatactatccgtttttttctcttttcggattggtaatcattaaaaagttgattgtttattaattcacaactttctttgattcaatgccatgctaaaattaaagtatgtttaaagtttagaagatatttttgattaaatcaagcaaaaagataatttaatatatatgttatcatttttaaaaataactgtaatagaaaagagaatataaaatgaaaaataataaagatgaaaaaataagaatatccataattaacggatttttgggtagtggtaaaaccacgttactgacacattatattagtgaattattaaaaaatgatgagaaaattaaaatcatcatgaatgaattcggtacttttgatattgatagcaatagtatttcaaatgaaattgaagtccattcattgattaatggttgtgtttgttgcgatcttaaacaagaacttgtctatgaactaaaagccattgctttaaaaggggacgttaatcatgtcatcatagaaacgacaggcattgcgcatcctttggaattactagttgcatgtcaagatccgcaaatcgttaatttctttgaaaagccgattatttatggtgtattagatgcgactcgatttttagaacgtcatcaatataccgaaaatacagtttcgctgatggaagatcagttgaaactaagtgacatgattattattaataaaattgatcttataactgatgaccgtcttgagagaattgataagcaattaggtatgatttgtgcaagtattccaacatataaaacaacctatggaaaagtttcgttggaagaattggacttaactgttaaagacagagagatatcgtctcatcatcaccatcatcatgggattaaaagtatgacttacacgtttacaggtccgattgatcgtcaattgttttatcaatttataatgaaattaccggaatctgttctacgtttgaaaggttatgtgtcatttagagatcaaccaaatgcaatttatgaatttcaatatgcatatggtttaccagactatggaataattggcatgcaattaccattaacgattgttattattggtgaaactttagatacaaatcacatacgtaatcaattggatatgctacaatttacgtaaatcagaaaatgtgttgtttcaatttaacggaaatagcacattaatttcttaatacttttattgtgaatattttgtgacattgagggatggagtggatgagatatggaacaaataatgattaatcactatgttcatttttctaggcttgtacaaggtttttggcgtgcaaatgaatggaagatgactgcgaaagagttaaattattttataaatgaattagttgaacgtggaattacaacgatggatcatgctgatatttatggggattatcaatgtgaatcactgtttggtaatgctttggatttatcacccgaattaagaaataaaattcaaattgttacgaaatgtggtatcattttgccttctaagcaatttgattttacaaatggacatcgttatgatttgagtagtaagcacatcgtgaaatctgttgaacagtcattaatcaatttgaatgtagattatttagatagtctactcattcatcgttcttcatcattgatggatccagaacaagttgctgatgcattaactaaacttgttaaacaaggtaagttgaagtcattcggggtgtcgaattttaatcattcacaataccaattgttaaatcaatatattatgaaagaaagactacatattagcatcaatcaattagaattatcgccatatcacgttgatagtttacaagatggaacaatggattcaatgtatcaaaaccatgttcaaattatggcttggagtccttttgcaggcggtaaaattttcgacaaggaagatattaaagcgcaacgtattatgaaagttgttcaatcaatagctgacaaatatggtgtgagtgacacagctgtgatgatagcatggttagtaaaaataccgcatcgtatcatgccgatacttggaacaagtcagttaaagcgtattgatcaagcaatcgaagggctacaacttaatttagatgatcagtcgtggtttgacatttacaccgctattatcggacaagatattccgtaaacttatttacttttaaatcataaaggagcatatcatgacaaacgaagataaacgtttcgaacaattaagatttgaacgcaaatttatagttattccgtatttaatttatgcagtcattgtattactattaaatattttctattctgatttgaaaataacaatgacattattcggacttttctttgcgtataatgtagtcattttgttcatagcatttattaaacattataaacgcacattgttactaagtcttatattaacagtgcttagtggcgcggcattctttggaattatttatgtttatggcattaatcatttttaaatattaaaaagagactatctacaataatctcatttgcattttatctaactaagtttaacttttgcttagaaaaatgatgctatgaggatattcagtagatagtttttttatgatctaatatttaaacttagatatcgttttgtaattaaccgagataactcatcacctagcaatattatttacaaaatatttcgataaaattgtgtattttgcataaattaaaaatgtatgttttaaaaaattgttataattaaattaagattaaacaaaggggtgactgttatgtcagaagaaaaacatgtagtggaacatgaacaacaaaagaaagaaaagacaaaaaagcaatacaagccattttggattgtcatgagttttataatacttatagttgtactattactcccggcaccttcaagtctgccgataatggctaaggcagtactagctattttagcttttgcagttattatgtgggtaacggaagctgtatcatatccggtgtcagcaactttaattattggcttaatgatattacttttaggatttagcccggttcaaaatttaggggagaagctaggtaatccgaaaagtggcagtgctattttagctggaagtgaccttctaggaactaatcatgcattatcattagcgtttagtggatatgcaacttcagctgtagctctcgttgcagctgcattatttttggctgctgctatgcaagaaacgaatttgcataaaagactagctcttttagtgttatcaattgttggtaataaaactagaaatatagttattggagcaattatcgtttcaattgtacttgcatttttcgttccttctgcaacagctagagcaggggcagttgtaccaatcttgctgggtatgattgcggcatttaaagtttccaaagatagcaagttagcgtctttattaataattacttcagtacaagctgtgtcaatttggaatattggtatcaaaacggcggcagcacaaaatatcgtagcgattaattttataaaccatcaattaggatttgatgtttcatggggcgagtggttcttatatgcagcgccttggtccatagttatgtccgtagctttatatttcatcatgattaaagtgatgcctccagaaattaatacaatagaaggtggtaaagatttaataaaagaagaattgcataaacttggccccgttagcccacgtgaatggcgtttaattgttatatcgatgttattattactgttttggtcaactgaaaaagtattacatccgattgactctgcatccattactattattgctttaggtgttatgttaatgccgaaaattggtgtcatgacatggaaacatgttgaaaataaaataccatggggaacaattatcgtgtttggtgtaggtatttcactagggaacgttcttttgaaaacaggtgcagctcaatggttaagtgatcaaacttttggtgttttaggtttaaaacatttacctattatcgcgacaattgcacttatcacgctttttaatatattgattcatttgggctttgcgagtgcaacaagtttatcatcagcgttaatacctgtttttatttcgctaacctctacgttacacttaggagaccagtctataggatttgttttaattcaacaatttgttattagttttggtttcttattacctgttagtgcacctcaaaatatgttggcttatggcactggtacttttacggttaaagatttcttgaaggcaggtataccattgacaattgtagggtatattctagtgatagtttttagcatgacttattggaaatggttaggtttgctttaattaaaaatataaataagaatctaggttattttaaagtgacaaaaagcttaataaaataaaaagataattgaagggtgttttgtttatggcaattgctgtgttattaaatcgaatgtttcgaatggaacacaatccattatttgaatatatttatcaacaaaaagaagacattgatgcatgttattttatcattccggaagaggacatgtcttcagcttctgatttgaaagcacagttttatcgcggtactttgcagcgcttttaccaatcgttgcacgcagaaaagctcacaccttatgtcatgtcttatgacgatatcatttcattttgtaaagaaaacaatatctctgaagtagtgactgcgggtgatattatgagttatcatcttgaagaatatgatattttacatcaacgttctttattcaatgaagcacgcattgccgttactttgatacgtgggaatcattactttaaagcgagtaaaacaatgaatcaacaaggggagccatacaaagtttttactagtttctataaaaaatggcgaccttacttgaggcatagagacgtatatcactatgatttaaaatcattcgaagactttgtcattgcatcacctgatgatttagtgtttgatgacatagcatttggatcctcacaaataattgaacagaataaatggcaacattttttagatcaagatatacagaattacgaaagcggaagagactatttacctgaagtattaacaagtcagctaagtgttgctttagcatatggattattagatattattgaaatttttaatgatttattggcgcgttatgatgaagatgaggcaaactatgaagcatttatacgtgaactcatttttagagaattttattatgtgttaatgacacagtatcctgaaacctcataccaagctttcaaacctaaatatcgacagataaaatggtcgcaaaatgaagcggattttaatgcatggtgcgaagggcaaacaggatttccaatcattgatgcagcaataatggaattgacacaaactggttttatgcataatcgaatgagaatggttgtgtcgcaatttttaaccaaagatttatttatagattggacatggggagaaaaattctttagaaagcaccttattgactatgatgcagcatcaaatattcatggatggcaatggtctgcttctacaggtacggatgcagtgccgtattttagaatgtttaatccaataagacagagtgaacgctttgatgctaaagctttgtatatcaaaacatatcttccgatttttaatcaaattgatgcaaaatatttgcatgatacacaacgcaatgagtccaacctttttgaacaggggattgaattaggtagtcattatccaagacaaatggtagatcatcaagaaaaacgtacacaagttttagctacatttaaagcgctagactaattcggctcaattgatagatctggcatgagtaaaatctggagcagaatataaagttcttaagcaatataaataagccaatttctattattgatgtgatagaaattggctttcctcaaatatataagttgtatttagttttcttattaatttgatgttatcttagtatgtccgtaaataaagtgaggtatagtacgacatactctaaaaacgtagcgagataaatatatttcaatctaacttttatgttttgaggcacttgccatttaggatattgtcgttcgtaatacgacacttgttgtataaatacacctagtccaaatggcagcatcatgagtaagatacttcttaaataacttaaaccaatatcatgccatatgtgtccaataatcaattgaaagacaatgatagatactattaaaacgattatatttattgtcacttgttcaaacgcactccttttccaaataatagaattgctgcttgcatgacaaccataaaacatacaaacatagcagttttaagcgttagactttctagaatgtgatttagaacatgtaagggctcattaaagaaataaacggaatgtaagcgtaagaaacgaccaatataaattccgaatccatttaaaaacattagcacgacaacaattaatctattaagccaacggtgagaagtcaatgttagtatttcaaaatagattaaaatcatcacataaaccgctaagaagacaccaagcagtaaataggtaaagtatttccactcacttaaatttagtcctgcgtaaaagttgaattgaaattggttcaaatggattaaatcagttaccatataaaatgtatttggtaaaagtaacacaaatataaaactatatatgataaagagtggccattcatactttttattcggtttgaataatcgtaataatagactaagctcaaaaggtatatatgctaaaaacaaatttaaagtcataaattgaaaaattttagtctcaaaaagggagacgataaataaaattaaaaagtaaattctagcgatgtatcgagattgcatcaataataaacactactttctaatgaaaaagttattcattcaaatgtgatagttataaacgcattcaattcctaattaaaaatttaatttaactcgttgaagtatattaataaacgagaatgcatttatgattaagcacttatgataacttgtaataaaatttgattcaactaaaaagtaaagtgctattgaggatcaagtaaatttaaaccgactgcatctttgaatgaacgttgaatgtccaaatcagttacagtaagaatgatttcagcagttgcagaaacaattgctttagcgagatgtccgctaaaagtttcatatgattgagtaccgaaagtagcatgcaaatgtgcaaaatgaccattgtctagacgagaaatattacctaataagctcgtcaattccagtggctcagtaatatgtttttcttcgtattgtttcgttgttaaattgaaaaattttaatacaacgtcatcacatgcaccaatgccgctgacagatgtaaatgttaagtcttggtcatctgcaaaggttgttatacattcaacgatatcttctcctttttccaacactagtagtatagtatgattacttttttgcaatttcatatgatcaatcccctttattttaatatgtcattaattatacaattaaatggaaaatagtgataattacaaagaaaaaatattgtcaaatgtagcaatgttgtaatacaatatagaaactttttacgaatatttagcatgaattgcaatctgtcgtggaaaagaagaataacagctttaagcatgacatggagaaaaaagaggtgagcatatgaataaacagatttttgtcttatattttaatattttcttgatttttttaggtatcggtttagtaataccagtcttgcctgtttatttaaaagatttgggattaactggtagtgatttaggattactagttgctgcttttgcgttatctcaaatgattatatcgccgtttggtggtacgctagctgacaaattagggaagaaattaattatatgtataggattaattttgttttcagtgtcagaatttatgtttgcagttggccacaatttttcggtattgatgttatcgagagtgattggtggtatgagtgctggtatggtaatgcctggtgtgacaggtttaatagctgacatttcaccaagccatcaaaaagcaaaaaactttggctacatgtcagcgattatcaattctggattcattttaggaccagggattggtggatttatggcagaagtttcacatcgtatgccattttactttgcaggagcattaggtattctagcatttataatgtcaattgtattgattcacgatccgaaaaagtctacgacaagtggtttccaaaagttagagccacaattgctaacgaaaattaactggaaagtgtttattacaccagttattttaacacttgtattatcgttaggtttatctgcatttgaaacattgtattcactatacacagctgacaaggtaaattattcacctaaagatatttcgattgctattacgggtggcggtatatttggggcacttttccaaatctatttcttcgataaatttatgaagtatttctcagagttaacatttatagcttggtcattattatattcagttgttgtcttaatattattagtttttgctaatggctattggtcaataatgttaatcagttttgttgtcttcataggttttgatatgatacgaccagccattacaaattatttttctaatattgctggagaaaggcaaggctttgcaggcggattgaactcgacattcactagtatgggtaatttcataggtcctttaatcgcaggtgcgttatttgatgtacacattgaagcaccaatttatatggctataggtgtttcattagcaggtgttgttattgttttaattgaaaagcaacatagagcaaaattgaaagaacaaaatatgtagcataagtattttggtgtatattgatataaagtaaagcgtaatattatgaatgattagcatcgtttttcttatgaattttattaagaaaattcgatgctttacatttaaaaagattcgattgactaaatgttttactctttatatttaaatgttatatgtaacaaaaaatgattttgagtaataaacatgttacaaatattacattctttttaaattgcaatccacatacctaattcattaacgttaatgtgttaagatgataaaaaatgagtaaggaaatgtgggtaaggggatgacagtaaaaaatttatttttaggctttgttgctgtaatattaaccgtttgtttaattggtttattaatattagcaacaaatgaagatgcgcttgctaaggtacataaaacaattaatacgcttaacgcgataaatgtatcaactgaagatacttataaaaagaaaatggatattctcaatattcatactgctaaatcatctgaagtgaatgaaaatatgaaaaagcaaaatcattttaaacatcgtgtgaatgcaaataaatcaaattcttttaacgaacaagagtgccaagttattgctgatcgttatgcagataagcatatcaatgataattatggtttagaaagaatttctaagacaaatcatggatataattatgtttattccaatgataattcaactagtaagcaacatgtaagtatttcaaatcaaggcataataacgaaataataatggaacagtgtattctaattggatatactgtttttattttgcaataatttaatttaaaaaggtgaaatcaacttataaaatgatgtaaatgttatgtcaaaatcaaccaatccgtaatgtattttaaaatgttaatatagttctgaagaagtataaatgaggtgttgaaatggctaaaaataagaaaacgaacgcgatgcgtatgcttgatcgtgcaaaaattaaatacgaagttcatagctttgaggtaccagaagaacatttatctggtcaagaagtcgcagaactcatacaagcaaatgttaaaacagtatttaaaacgcttgttctagaaaatacaaaacatgaacattttgtatttgttatcccagtaagtgaaactttagatatgaaaaaggcagctgctttggttggagagaagaaattgcagcttatgcctttagataatttgaaaaatgtaacgggatacattcgtggtgggtgttcgcctgttggtatgaaaacattgtttccaacagtcgttgacaaatcgtgtgaaaattatagtcatatcagtgtgagtggtgggcttcgaacaatgcaaatcacaatagctgttgaggatttgattacaataactaaaggcaaaattggagcagttatccatgaatgattaataacaacaaaaagtatggggcaagattcggagtgtgacagagatgaaatttttataaaattcatttctgccacactcctttttgattgaattagcattttacgatcataaacagtcattacaaatgagtatttgaacataaaaatgtaattttatcgtcacaatttgattgtttgtgattgtttttggtaatttatgattgaaaagtgaaagcgtactcattataatacagagtgagatggggtgatgatgataattacagaaaaaagacacgagttaatattagaagaactttcgcacaaagattttttgactttacaagaactaatagatcgaactggatgcagtgcttcaacaatacgaagagatttatctaaactacaacaattagggaaattgcaacgtgtgcatggtggtgcaatgttaaaagaaaatcgtatggttgaggcgaatttaactgaaaaattagcaacgaatcttgatgaaaagaaaatgattgctaaaatagcagctaatcaaatcaacgataatgaatgcttatttatcgatgctggttcatctacattggagctaattaaatatattcaagcgaaagatatcattgtggtaaccaatggtttaacacatgtagaagctttacttaaaaaaggtattaaaacaattatgctaggtggtcaagttaaagaaaatacacttgctacgattggttctagtgctatggagatattaagacgatattgtttcgataaagcttttatcgggatgaatggattagatattgaacttggattaactactcccgatgagcaagaggcattagttaaacaaacagcaatgtcattagccaatcaatcatttgtacttatagatcattctaagtttaataaagtatattttgctcgtgtacctttgctagaaagtacgacaatcatcacatctgaaaaagcattaaatcaagaatcgttaaaagaataccaacaaaagtatcactttataggagggactttatgatttatacagtgactttcaatccttcaattgactatgtcatttttacgaatgattttaaaattgatggtttgaacagagcaacagcaacatataaattcgctggggggaaaggtattaatgtctcgcgcgtcttaaagacattggatgttgagtcaactgccttgggatttgcaggtggatttcctgggaaattcattatagatacattaaataacagtgcaattcaatcgaattttattgaagttgatgaagatacacgtattaatgtgaaattaaaaacaggacaagaaacagaaatcaatgcaccgggtcctcatataacgtcaacacaatttgaacaactgttacaacaaattaaaaatacaacaagcgaagatatagttattgttgctggaagtgtaccaagtagtattccaagcgatgcgtatgcgcaaattgcacaaattacagcacagacaggtgctaaattagtagtcgacgctgaaaaagaattggctgaaagcgttttaccatatcatccactatttattaaacctaataaagatgaattagaagtgatgtttaatacaacagtgaactcagacacagatgttattaaatatggtcgtttgttagttgataaaggtgcgcaatctgttattgtctcgcttggcggtgatggtgctatttatattgataaagaaatcagtattaaagcagttaatccacaagggaaagtggttaatacagttggctctggtgatagtacagttgcaggcatggtggctggaattgcttcaggtttaacgattgaaaaagcattccaacaagcagtcgcatgcggtactgccacggcatttgatgaggacttagcaacacgggacgctatagaaaaaataaaatcacaagttacgattagcgtacttgatggggagtgaaaataatgagagtaacagagttattaacaaaagatacaatagcaatggatttaatggcaaatgacaaaaatggtgttattgatgagttagtaaatcaattagacaaagcaggtaaattaagtgatgtcgcgtcatttaaggaagcgattcacaatcgagaatcacaaagtacaactggtatcggcgaaggtattgccattccacatgccaaagtggccgcagttaagtcaccagctattgcgtttggtaaatctaaagcaggcgtagattatcaaagtttggatatgcaaccagcacacttattctttatgattgcagcgccagaaggtggcgcccaaacacatctagatgctttagctaagttgtctggtattttaatggatgaaaatgtacgtgagaaattattacatgcttcatcacctgaagaagtactagcgatcatagatgaggctgatgatgaagtgacaaaagaagaagaggcagaagctgaagcacaacaagttgcaactgcagaacaatcatctaaacaatctaatgagccatatgtgttagcagtaactgcttgtccaacaggtattgcacatacgtacatggcacgtgacgcattgaaaaaacaagcggataagatgggtattaaaattaaagtagaaacgaatggttcaagcggcattaaaaaccatttaactgaacaagatattgaaaatgcaacaggtatcattgttgctgctgatgttcatgttgagacggatcgcttcgatggtaaaaatgtcgtagaagtaccagtagcagatggtattaaacgcccagaagaattaattaataaagcattagatacaagtcgtaaaccttttgttgcccgtgatggtcaaagaaaaggtaactcaaatgacagtcaagaaaaattaagcccaggtaaagcattctataaacacttaatgaacggtgtttctaacatgttgccacttgtaatatctggtggtattttaatggcaatcgtatttttatttggagtagactcatttaaaccaaaaagctcagagtacaatgcgtttgcagagcagctatggaacattggtagtaaaagtgcattcgcgttaatcattccaattttatctggattcattgcacgtagtattgcggataaacctggttttgcagctggtcttgtaggtggtatgttagcaatttcaggtggttcaggatttattggtggtattattgcaggtttcttagcaggttacttaacacaaggtgttaaagcgatgacacgtaagttaccacaagcattagagggattaaaaccaacattaatttacccactattgacagtgacagctacaggcttattgatgatttatgtctttaatccaccagcatcttggttaaatcatttgttattagatggattaaacaatttatcaggttctaatattgtattattaggtttagttattggcgctatgatggcaattgatatgggcggtccattcaacaaagcggcatatgtttttgcaacaggtgcgttgattgaaggtaatgcagcaccaattacagctgcaatgattggtggtatgattccaccgttagcaattgcgacagcgatgttaattttcagacgtaaatttacaaaagaacaacgtggttcaattatccctaactatgtgatgggtatgtcctttattacagaaggtgcgattccatttgcagctgccgatccattacgtgttattccttcaatgatgattggttcaggtataggtggcgcaattgctttaggcttaggttcacgaattactgcgccacatggtggtattattgtaattgttggtacggatggtgcacacttacttcaaactcttattgcacttctagttggtacattagtttcagcattaatttacggtttaatcaaacccaagttaactgaaacagaaatcgaagcttcaaaatcaatggacgagtagttttaatgatgtaaaatgattgttagcaaagagcttcatattaagttgtaagttcaatgaatatatgttagttttatacatcgtgttaacggtagcttatacaaagctgtaaaaacactttctattaattcagtttttatgaattgatatgaaggtgtttttatttttagataaatgaatgaagaaatagacaccacaaatgtatagacttttttaatattttgcaaaaagttatgccaaacgaagcagatatagtaaaatatgagtgtcttaaagtgaaaatttataaataaagaagggtttatacgtgtcagaattaattatatataacggcaaagtttatactgaagatggcaaaatcgataatggttacattcatgtgaaagatggacagattgttgcaattggagaaggggatgataaagcagcaattgataatgatacgacaaataaaattcaagtgattgatgctaaaggtcatcatgtattaccaggttttattgatatacatattcatggtggttatggtcaagatgcaatggatgggtcatacgatggcttaaaatatctatccgaaaatttgttatctgaagggacgacatcatacttggccactacaatgacgcaatctactgataaaatagataaagcacttacaaatattgctaaatatgaagcggagcaagatgttcacaatgcagcggaaattgtaggtatacatttagaaggaccatttatatctgaaaataaagttggtgctcaacatccgcaatacgttgtacgcccatttatcgataaaattaaacattttcaagagactgctaacagattaataaagattatgacgtttgcacctgaagttgaaggtgcaaaagaagcgcttgaaacgtataaagatgacattattttttcaattggtcatacagtggcaacatacgaagaagcagtcgaagctgttgagcgaggagctaaacatgtcacgcatttatataatgcagcgacgccattccagcatagagaaccaggtgtttttggagcagcatggttgaatgatgctctacataccgaaatgattgttgatggcacacattctcatccggcatcggttgctattgcttaccgtatgaaaggtaatgaacgtttttatttaattaccgatgcaatgcgtgcaaaaggtatgcctgaaggagaatatgatttgggtggacaaaaagtaactgttcaatcgcaacaagcacgtcttgcaaatggtgcgcttgctggtagtattttaaaaatgaatcatgggttacgtaacttaatatcatttacaggtgatacattagatcatttatggcgagtaacaagtttaaatcaagccattgcattaggtatcgatgatagaaaaggtagtattaaagtaaataaggatgcagatcttgttattctagatgatgatatgaatgtaaaatctacaataaaacaaggtaaggttcacacatttagctaataaataatcataattaaatgtatgcaatagatttaatctgttaacataagcactttatattatgataaaatagaagcaataacatttttttctgggggtgtctaaatgggaaggcgataacatgtagttgtaatttaagtcatagtgataaatttgaatgcgtgttacccatgagtgacacatataacatggaggtgaatccctagaaatagggaattaattggaaacttcgaccataattagtttgattatatttattctattaattgcattaaccactgtatttgttggttcagaatttgcattagtaaaaattagagcaacaagaattgaacagctagcagatgaaggaaataaacctgctaaaatagtaaaaaagatgattgctaatctagattattatctttctgcttgtcagttaggtataacagtaacatctttagggttaggttggcttggtgaaccaacgtttgaaaagctattacacccaatatttgaagcaatcaatttaccaactgcattaacgacgacgatttcgtttgcagtgtcatttataatcgttacgtatttgcatgtagtacttggtgaattagcgcctaaatctatagcgattcaacatactgaaaagcttgctttagtatatgcaagaccattgttctatttcggtaacattatgaaaccattgatttggctgatgaatggttctgcacgtgttattattagaatgtttggtgtaaatcctgatgcccaaactgatgcaatgtcagaagaagaaatcaaaattattattaacaatagttataatggtggagaaatcaaccaaactgaattggcatatatgcaaaatatcttttcattcgatgaaagacatgcaaaagatataatggtacctagaactcaaatgattacactaaatgaaccttttaatgtagacgaattactagaaacaataaaagaacatcaatttacgcgttatccaattactgatgatggtgataaagaccacattaaaggatttattaacgtcaaagaatttttaactgaatacgcttctggaaaaacgattaaaatagcaaaatatatacatgagttgccaatgatttcagagacaacacgtatcagtgatgcattaattagaatgcaacgtgaacatgtacatatgagtcttattatagatgaatatggtggaacggcaggtattttaacgatggaagatattttagaagaaatcgttggagaaattcgtgatgaatttgatgatgatgaagtgaatgatatcgttaaaattgataataagacattccaagtaaatggcagagtactattggatgatttaactgaagagttcggtatagaatttgatgactctgaggatattgatacgataggtggatggttacaatctcgtaataccaatttacaaaaagatgattacgtggatacaacttatgatcgctgggttgtttcagaaatcgataaccaccaaattatttgggtgatattaaactatgaatttaatgaagcgagacctactatcggacagtctgatgaagatgaaaaatcagaatagatattaatatataaaccaactaagaatgatttaattcatttttggttggttatttttttgactaaaattaatgaaaagtgaaaatagtattggaactcaatatctttaatgatttaatgaatattttttattgaaagcgataattcgtattaattgagtttattgaaaaatttagggtaatgtaaagatataaaagatacatagattggagagatataaagatgttgaatgagatacaaatattaaataatggatacccgatgccttcagttggattaggtgtttataaaatctctgacgaagatatgactaaagttgtaaatgctgcaattgacgcaggctatagagcgtttgatacagcatacttttatgataatgaggcttcactaggacgagcattaaaggataatggcgtcgatagagaagatttgtttataacaacgaagttatggaatgactatcaaggttatgagaaaacattcgaatatttcaacaaatcgattgaaaatttacaaactgattatcttgatttatttctaatacattggccttgtgaagcagatggtctatttttagaaacatataaagctatggaagaactttacgagcaaggtaaggtaaaagcaataggtgtatgtaattttaatgttcatcatctagaaaaattaatggctcaatcaagtatcaaaccaatggtgaatcaaattgaggtacatccatattttaaccaacaagaattacaagaattttgtgatcgtcacgatattaaagtgactgcatggatgcctttgatgagaaatagaggactactagacaaccctgtcattgttaaaattgctgaaaaatatcataaaacaccagcacaagttgtattacgttggcatttagcacacaatagaattattattccaaaatctcagacacctaaacgcattcaagaaaatatagatattttagattttaatttagaattaacagaagtagctgaaattgatgctttaaatagaaatgcaagacaaggtaaaaatccagatgatgtgaaaattggggatttaaaataactggatgttaaattttacgtttatgaatgccttttaatgtgtacattaaaataaatgagttggtttttactatttgataaaacaatactcaggtacattcaaaatcttttaaataaaaaggatggacatagatgaaaattagagtcgtcattccttgttttaatgaaggggaagtcattacacaaacacatcaacaattaactgaaatactttcacaagatagtagtgtgaaaggctatgattataatatgcttttcatagatgatggtagtacggataccactatagatgaaatgcaacatcttgccacaatagataggcatgtcagctttatttcttttagtagaaattttggaaaagaagcagctatgattgcaggttaccagcatagtactgaatttgatgcagtcatcatgatagattgtgatttgcaacatccacctgaatatattccgaaaatggttgaaggttttatggaaggctatgatcaagtgattgcaaagcgtgatagaagtggtgaaaattttagtcgcaaaacattaagccatttgtattataagttagttaattgctttgtagaagaagtacaatttgatgatggtgttggtgattttagacttttaagccaaagagctgttaaatccattgcatcacttgaagaatataatcgattttcaaaagggttatttgaatggataggctataatactaaagtgtttacgtatcaaaatgttgagagacaaaaaggggaatctaagtggtcctttaaaaagttatttaattatggtattgatggattgatttcctttaatagtaaacctttgagaatgatgatttatcttggcttgtttatcttttcaataagcgtgctatatattatctatttattcatcaatattatgatatctggtgttaatattccgggatatttttcaacgattgcagctattttattattaggcggcatacagttaatttcaattggtgttgtaggtgaatatattggcaggatatattatgaagttaaggcacgtcctaaatatattattcaagctacaaatctttcaagtattgaaaatgatgagaaggatacccataaagtttattctaaataaacaaaaaaagaagccctcattaatgggagcttctttttagtctttgcattttattttataaataaatcggattatgacgtaatgtctaatttgtgtaatgttacagtcatcgtagttcctacatctatatcactgcttacactgatttttgcgttattttgttgcgcgagttcattagctatatataagcctaatccagaaccacccgtttttgtattacgagagttttctactctgaatgtacgttcgaatatacgttcttgtagttctggtataatgccaataccttcatcgctaatagcaatgtcgatagtatcttgatctttgttttcactaatattaatatcaatgcgactaccaacatttgaaaattttagcgcattatcaagtaagtttgttaaaatacgctcaagtggcgttcgatattgataaaatgcatcaatttcgctacagaaattcacttctaatgtgcggttttcatgtttgatacgttgctcatatggttgcaatattgatacaagtaattggtctagttgtattaattctgggggatatgttttacctgtatttaaagtgataatatgagtcatatcatcaaataatgttgataatctgtttgcttgtttaattaatatgtcgtatgactctttaatctcatgatcctttgtgattataccatcacgtagtccttcagaatatgaaataatgcttgctaaaggtgtttttaaatcatgggctaagttttgaatcagttctgttttttcttgttgttcggatttaatttgattcatttgttgcgtaatttcagaagccattttattaaaagattgatttaattcataaatttcttttggtgaattaaacgttttatcattgcttgcgtaatttccgttagcaaattgcttagtttttatattaaactgcttaattttttgtataagtggattaataaaaatactacatattaataaggttaaacagcttgtaattattgtcgttaaggtcaaagttagtgtcatatggccgttaaaccacattaaaatatatgcaattgctaaaatagttgaagttaatagtatactcgatacgacgccaataatgatttgacttctaattgataacaccattatcggctcctttcaaatttatatcctaatccccatacagttgtgatggtatatgttgtaaagctctctttttctaatttttctctaatacggtgtatatggacattcacggtattagcatcttcgtaatagtcatatccccaaactttttcaagtaattctgatttagaaataacttcattttctctagaagctaaataccacaataactcaaattccttaatacgcatagggacttcgtgaccatttacagtcacaactttacttaagttaataagtgttaattcatcaaacgacagttgttcaactggttgatgatggtatttcttcattcttgtaagtaaattattaatacgtaaaacgagttcccttggactaaatggttttttgacatagtcatctgcacctaaagttaaggcgtaaatggtatcatgttcttgtgttttggcagttaaatagataaaggggatatctaatttttgccttttcatttctttgacaatgtcgtaaccattaacttctggcatcatgatatcaagtaccatgatatcaatatcatttgatagtaaagaaattgcttctttaccgctagttgtcgttgttactttgtaaccttcatattcaaaataggtttgacaaatgtctacaatgtcttgttcatcatccacgatcagtaagtgggtcatctattttttcacctctgttcttacgacctctaaagtaattaatgatttctttaagtgaaatctgttttaacaatgagtgactcattagtaaaaggataaagaaagttaattgaagaggatacgtaaatatcatatctgctaagatataatttatcataacaaaggctccaaagaaactagcagcatatgcaaaaactccaaaaattaaacctaatccaattgcaatctctccgagtgggacaacaatatcaaataatgacgtcgtatgtgcaactatatttgcgaaaaaccacttataccactctggtgaatcagtattgttagcgatgactggtactaaacctttcagcgtaaatccgcccgttaatttttcgtagccttgcattaacataacaatacctgaacccacacgaatgataaatgtaacgagtagcaataatttattcatgatgttcacattctttctatttattgtgtgtaatttatataaacataagattaagcaacataatgcgatttgtagtgttatgtgaacaggaagtgtttgagctcatgggttgcttaagctaaacaaacctcaagctctaaaaaaattttacttatgtgctctacaatcttatgggatttaatagttgtatatatattgaaaaaaggaaagtatgatttctacaagctaggggggctgtgaaatcatacgctttccattgagtaatgagtgtaatgtatatttttaaaatttgtaatgtatagtaatagtatgttgtaaataaaagtttaactcagaaattgattattttaatttagcgccgccgaagatgacgtgagcttttttacaatagattgttacttcatcatatttgcttaaatctacatttttaagatcaaatgtttgtttttctttatcgtagtcaaccattgcgatttctttaccgtttttaatgtcgccattttttgttaggtagacgtataaatctggaccttttgatgatttgtagttagtaagcattaatttaccatttttaatctcagctttaccttcaacagtttcaccgtttttagaactgaatgtacctgttaggtgttttgttttatcagttttaacattgctatcttctgactttgttttttgttcagttttgttaccttgatcttgtgaattagaattaccacaagcgcctaaagttaatacagaggcaacagcaccaactgctaaaaaatattttgtattcatgctaactcctcatttcttcaatttgataagttaagtttaaaatgaaggcaaataatatgccattaactaattcttaacttcgtttaaatatcgcttaactaatattgaagaaagaataatttgaaaatgaaaataattgtctgatttaaataaataggagtcaaaataagaggagggcatttttttaggtgagaaaatatttatctgaactagataacactataaaacacttctgatattttgaactaagaatatcagaagtgttttatagttttggtattaaaatttataaaccttttgccacaataaaaacaacaagaaaataagatagacgattaaatacaagtaccaatatggtgttaaaaccatcataacgataaatgaaatgttaataatgataagtcctttaatcattagtttctttattttgttattattttcagcagtttcatctaagctattaaatgttgaaataaacaacataataccaccaatgatgaaaattgcaggggctaaaaatggaatagacatatatattgattgtgtacttgaaaagtcggtaacacgttgcgttaaactgacaacaatcgttaatatgatagcaataaatttttggtctgtaatgtatacaggttttaattttttatcaatgtaaaactgtagtatcgtccaaatgataaacatcgttatagtacacagagtaataaagttatatttatcaattatgaatgtatttataaaggcgtttatcgtaatagataacaacattgcacttaatgataaatgttgcatttgatgcctatataaattgaatccagttataagtacgacgatagcaatattaattaatatatataaaatcatgatggactcctgttcgttatacttcaatcaactattatatcaattaatatattgttattcattagatatgacttgtaaaaagtaaaataagttatcctttatacaccttttttattactccaaagtaatgtatgaagttgtggtaacacataaacgtgattcatatcattactttgcataactaaatccaccaactgctcgtagcgttctaacaacttttcggtatgattatctacgctgtctgataaatatgggttaccaacttgtaaatagaagggaatatctggataacggtggtgtatcattttggcaaaatcataatctttatcgtcgaatacaactacttttaagtttaatgaggaaggtacgcattgtgtaatcacttcatctaacttttttaaatcaggtgtcatagttgaacttggtggttttggactaatcgttaaatcatcaatttgtgtcatccaaggttggaatttactgccttgtgtctccagtgcgctgaaaatacctttatcttgaaataagtcaactaactcttggatacctttaattaatgctgggttaccaccagaaattgtaacgtgattaaataaatcgccaccaattcgttttaattcatcataaatttcttcagcggtcatgagttttatatcgcctttagcactaccatcccaagtaaatgcagaatcacaccagctacagcgataatcacatccagctgttctcacaaacatcgtttttctaccgattactcgaccttcaccctgaatggttggaccgaatatttcgagtacaggaattttagccattagttacacctgttcctttggtctaaatacaacataacttgttggtgtttctcttacaaatacttgaatacattttggttggtgttcgagcgatgccaaattttctttaacaatttgataaattgtttccgctacgatttcagttgaagggattttgtttttaaaagcaggtaagttatttaacagttgatggtcaaatttaccgtgtatcatctttttcaaatggctaaagttcactaagaagccagtgtcatctagtttatcaccgacaattgttaaattaacaaagtaagtatgaccatggacattttgacaaatacctgcttcttcacaaggaatgtgatgtgcagccgaaaaattaaagtctttatttaattcgaattgatatggatgcgttgtactaggatagatttgttgtaacattttaaagcgctcctttactttcaagatattgatttagtccacgttgacgtaaatgacaagctggacattcaccacagccatccccaatgataccgttatagcatgttaatgtttttgtacgaatataatctaaaacttcgagttcatcacttaatttccacgtttctgctttgtttaaccacattaaaggagtatgaatgacaaaatctttgtccatagctaggcttaatgttacgttcattgattttataaaactatcgcgacagtctgggtagcctgaaaagtctgtttcacatacgcctgtaataatatgcttagccccaatttgataagctagagcgcctgcaaacgacaagaaaagtaaatttctagctggaacaaatgtattaggtataccatcttcattattagtaatttccatatcatgttgtgttaatgcgtttggagtaagttgtgataataatgacatatctaaaacgtgatgtttcattccttgatcttgtgcaatttgttttgcgacttcaatttcagtatcatgtctttggccataattaaacgttacgagttcaacttctttgaaatgtttttttgcataaaagagacatgttgtactgtcttgaccaccactaaagacaacgatggctttttcattatttaatacactttccattttgtaattgctcctatcattaataatattaataaagaggttaatggcattgataagcccgtttttaatttataaaataaaaaaagcctatctccataaaagatagacgaaagaaatgggttgctcttataatatatattaaaggtttaccaacgaatgtttgaaatttcaatgtctagttttttatagagggtttcagctaggaacctctgatattcatttatgtacgatgaatagaatatactatatattagttaaaatcaaggtcaggataatgacaatgcttttaaagttttagctacatccaatacatattataaaaataaaacacatttagaacggagtatacaatgattctagtcatagataataatgattcatttacatataatttaatagactatattaagactcaaacgaaactaacagttcaagttgttggtattgataatctgctgatagaagacgtcattaatatgaagccaaaagcaattgttatttcacctgggccgggtaatccggatgattatcctatattgaatgaagtgttagaacaattttatcagcgtgtacctatactaggtgtatgcttaggatttcaatgtatcgtgtcttattttggtggaaatatcattcacggctatcatcctgtacacggacatactacacagttacgccataccaatgaaggtatttttcaaggactgcctcaaaatttcaatgtaatgcgttatcattcattaattgctgacggagcgacttttccaaattgcttaaagattacagccaaaaacgatgaagcgattattatggcatttgagcatattacatttccggtttttggtgtgcaatatcatcctgaatctattttgagtgaatacggttatcgacaagttgaattatttttatcgaaggtaggtgattactgtgagaatagaatataattatcgctactatttaactgaaaatgaatataagcaataccatattcaattaaagggatttataaagaagtatgttgctactaagttggctgatgtgggagaagtgatacactttgcacaagcgcagcaacgacaaggtagatatgtctcgttatatttaagttacgaagcggcaaagtattttaatcatgttatgtgtacacattcattaggtaaagatgatatttatgcagtagcttatagttttgaaaaagcggaaagcataaattcaacatatgaacatcaaacttcttatgtatcaaagcatcatttttcatttgttgaatcttctgaggttatgatgactaatattaaacgtgtccaacaagcaattgttgaaggcgaaacgtatcaagtgaactatacggcgcgcttaacggataacatttattatcctattagtactttatatgaacgattaactcaatttagtaatggtaattatactgcgttattacaaacagatgaaatccaagtagcgtctatctcaccagaattattttttcaaaaaggacagtttaacaatgtcgataacgttatcataagcaaaccgatgaaagggacaatgcctagaggtaaaacggaagctgaagatcaacagtattataaaacattgcaaacttcttcgaaagatcgtgcagaaaatgtcatgattgttgatttactaagaaacgatatagggagaatatcacagagtggctcaattaaggtgtataaactattttttattgaggcatataaaactgtatttcaaatgacttcgatggtaagtggtactttaaaaactaatacagacctaactcaaatcttaacatcgttatttccttgtggttcgattacaggtgcaccgaaactgaatacaatgaaatatattaaacaattagaaagttcacctcgtggtatatactgcggagcaattggactattacttccaactgaagatgataaaatgatttttaatattccgattcgtactattgagtataaatatggacaagcgatttatggagtcggagcaggtattacaattgattctaagccaaaagatgaagtgaatgaattttacgcaaaaaccaagattttggagatgttataatgcaattatttgaaacaatgaaaattgaaaatggacatatccctagacttacttatcatactaatcgcataaaatgttcttctgagcgattaaactttaaatttgatgaacatgcatggcgaaatgaattaaacgatgtaacaacaaagtatcacagtggccaatatagacttaaaatcgtattaaatgctgaaagcgaatttgaaacgatagtgtcacctttacctgagaaaagtagttttacagcaaaatttcaagtgttgcccaaagtagttaatccaacttttataaataataaaacgacagaacgaaagcatttagctcacaatcatgaaacagatttaatattgctaacttcagaggacggcaaggtccttgaatttgatattggcaacattgtcattgaagaggatggaaaatggtacacaccaagttataaagatgatttcttaaaaggatgcatgcgtgattatttaatagatagtgacaaacttgttgaaaaagactttaataaaaacgaattgatttataaatatcataacaatgagatacgtttatttttgataaatagtttacgagaggttgccgatgtccacctttgcctttaaaattattatgataataatgtagaaaatgatgtgaaaacaaatttaaaaattaaatggggccaaatatgattattgtttatattgtgctgttgttaattcttgtatacgtaaattatcgattagtgaatcgattgctatctgaaaatagaatatatgttgttcgtttgatagcaacaattactactgttataagctttatccttgtatacgcattaattcacgaactcatgccttttgttgtgcgggcaatggatttaatgtatcaccagtaaatttagtgagtaggtaaaatgaactattcaatcgattctataattaaaaatgaaagtaaagtaaccaaatattgaagaggtgtacaaatgaaaatatatagtcaaggtgaccaagccattgtagtcgcaattgaaaaagaagtatctaaaagtttaaccgaagatttattaacacttcgctcatatttaattgaacaaaattatccatttattatagaaattgtgccatcagaatcagacatgatgattgtctatgacgcaagggatatgattaaacaccataatatacaatcaccttttttatacatgaaagcactaatagaatcgattcatttaaacataaaacatgattttaaccagcaagatttgattgaaataccaattgtgtatggttcgaaatatggtccggatttagaatcacttttaaaacattacaaaatcaagctagaaacttttattgaattacattctaaggcgcaatattttgtttcgatgatgggatattcacctgggtttccttatttaactggattaaataagaaattgtatattaatcacacgagtaaacagaaaaaattcattccagctggttctgtagtacttgaagggaaaaaatgcggtattgtaactacggatacaattaatgattggttagttattggttatacaccattatcactttttaatccgaaagaatcagatttcgcacgcttaaagttaggcgataatattaaatttagacctatcaatgaaaatgaattagaagtaggagcgtttaaagatgtcaatcataattgaaaaaagtggcttattcagtagctttcaggactttggcagaaggggatatgaacatgatggtgtaattccatgtggtgcacttgatactttagcacatgaaattgctaatcgattagttgcaaatgacaagaatgaagcaactttggaaatgactaataaaatggcaacgattcgttttacagaacctacgctgattgcattagcagggggtaatgtcaaagcttacactgagcatatgactatatctccatataaattgtatttgttagataaaggcgatgttttaaagtttagagaaacaagttatacatcgcgagtgtatttagctgtgggaggcggatttgaattagatgcatggttaggatctaactcaaccgactttaatgtaaaaattggtggttttaaaggtagaacattacaagatggcgatgaaataaagcttaagagagattatacagctcgtcatcataagttatttgaaaaccttgctcacacgaaacaaacagattggggtattgatggatacgccttgtcatttaattatatgtctgatgtatttcatgtcgttaaaaataaaggtacggaagattttaaagaagatgccattcaaagatttgtgaaacatgattataaagtaacgagcaaagcaaatcgcatggggatgatgcttgaaggtgaaaaaatcaaagccttttatgaagatatgccaccgtatcagactgtcaaaaaaggaacgatacaaattaagcgtgatggcacacctattatcttattaaatgatcattatacgctaggtagctacccgcaaatcggtacaatcgcaagttatcatttaacgaaattagcacaaaaaccgcaaggatcacgtttgaaatttcaatttatagatattttaacggctgaaaagaaccttgttaagtatagtaactggttaaaccaattattccatggaatagaatatagaatgcaattagaaatgatgaaataatatttggtacgtagctcatactcgagtccgatgcaaataatttcctcctaatgtataatgaaataatactgtgttttatctgcgaaatgtatcatattctaattcgtttcacagtaaaatgaaaagatgaagtgtgtttttacttgaattttgactaaaattactctatatttattaattgagctatgcttattattacaatttgattacaaattttaaatttgttaattgaatgataatattaaataaagaaacttacacaagcaaatatgagttgtagcccaaaatacttgttaaatcaaagttgaaagctacaaataatgaaaattataaacttgaatctgaaagtaattactataattatgacaatgttaacttttaaacgcacttattaattaactacataatgttaatatctaatttattcaagtactttcgcaagatttattatctaaataacgggggaaagaatcatgagttcacaaaaaaagaaaattagtctttttgcgttcttcttattaaccgtaataacgattaccttgaagacgtatttttcttattatgttgatttttctttaggtgttaaaggtttagtacaaaacttaatattattgatgaatccttatagtttagtagcactggttttaagtgtgttcctattctttaaaggcaaaaaagcattttggttcatgttcataggcggcttcttattgacgttcctattatatgccaatgttgtgtactttagattcttctcggattttttaacgtttagtactttaaaccaagtaggtaacgtagaatctatgggtggtgcggttagtgcatcattcaaatggtatgactttgtttatttcattgatacgttagtttacttattcattttaatatttaaaacaaaatggttagacacaaaagcatttagtaagaaatttgttcctgtcgtaatggcggcttcagtagcattattcttcttaaacttagcttttgctgaaactgacagaccagaattattaacacgtacatttgaccataaatatttagtgaaatatttaggaccgtataactttacagtatacgatggtgttaaaactatcgaaaataatcaacaaaaagcgttagcatctgaagatgacttaacaaaagtattaaattatacgaaacaacgtcaaacagagcctaacccagaatattatggggtggcaaagaagaaaaatattattaagattcatttagaaagtttccaaaccttcttaattaataaaaaggttaatggtaaagaagtaacaccgtttttaaacaaattatcaagtgggaaagagcaattcacatacttccctaactttttccatcaaacaggtcaaggtaaaacatctgactctgaatttacaatggataacagtttatacggtttaccgcaaggttctgccttttcattaaaaggagataatacgtatcagtcactaccagcaattttagatcaaaagcaaggctacaaatctgatgtcatgcacggtgactataaaacattctggaacagagaccaagtatataaacactttggtatcgataaattctatgatgcaacatactatgacatgtctgataaaaacgttgtaaacttaggcttgaaagacaaaattttctttaaagattctgctaattatcaagctaagatgaaatcaccattctattctcatttaattactttgactaaccactatccattcacattagatgaaaaggatgcgactattgagaagtcaaacacaggtgatgcaacagttgatggttatattcaaacagcgcgttatttagacgaagcattagaagaatatattaatgacttgaagaaaaaaggattatatgacaattcagtgattatgatttatggtgaccactatggtatctctgaaaaccataacaatgccatggaaaaactattaggtgaaaaaatcacaccagctaaatttacagatttaaacagaactggtttctggattaaaatccctggtaaatctggtggtatcaataatgaatatgctggtcaagtcgatgtaatgccaacaattttacatttggctggtatagatacgaagaattatttaatgttcggtactgatttattctctaaaggtcataatcaagtagttccattcagaaatggtgactttataacaaaagattataaatatgttaatggtaagatttattctaataaaaataatgaactcataactactcaaccagctgatttcgaaaagaataaaaagcaagttgaaaaggatctcgaaatgagtgacaacgtgcttaatggtgatttgtttagattctacaaaaatccagacttcaaaaaggtaaatccttcgaagtataaatatgaaacaggacctaaagcaaactctaaaaaataatatttaaacacgaactcggattgataaaatatcaatccgggtttttattatgttcttttatattatgttttacattatatgtgttgataaaaaggtatattataaagatcattagcatagtcatcaaagccttaacaagttttatttatagttgaagcaacaatatattaaattatgacacttaacggtatcgatttcttttgatttcaaaaaggtgtataatgtatagaactgatttaagtacgtagagatttcaacagaagaaggaagatgggtatggaagcatataaaattgaacatttaaataaatcttatgccgataagactatattcgataacctagatttatcaatttcagaaggtgaaaaaataggtttagtaggcataaatggtacagggaaaagtacgttgttaaaagtaattggtggtattgatgatgattttacagccaatgttatgcatccaaatcaatatcgaattcgatattcgtctcagaaacaggaccttaatgaagatatgacagtttttgatgcagtattaagttctgatacaacaactttacgcatcatcaagcaatatgagcaggcagtacaagcttatgcggatgaccaaagtgataaattgttcaagcgaatgatggatgcgcaagatgctatggatcaacatgatgcttgggactataacgctgaaattaaaacaatcctctcaaaactaggtatacatgatactactaaatacattaaagaattatccggcggacaacaaaaacgtgttgtacttgcaaaaacattaatagaacaaccagatttattgttattagatgaacctacgaaccatttagacttcgaatcaatcagctggttgatcaattatgtgaagcaatatcctcatactgttttattcgtaacccatgatcgatattttttaaatgaagtttccactagaattattgaactaaacagaggtaagttagcgtcatatcctggtaactatgaatcttatattgaaatgcgcgctgaaagagaagtatcacttcaaaagcaacaacaaaagcaacgagctttatataaggaagaacttgcttggatgagggctggagctaaggctcgtactacaaagcaacaagctagaattaatcgatttaatgacctagaaaatgaagttaaccagcaatataaagacgataaaggtgaattgaatcttgcttattcaagattaggtaagcaagtgttcgaattagaagacttatcaaaggctattaatgataaagtattatttgaacatctgacggaaattattcaaaaaggtgagcgtattggtgttgttgggccaaatggagctggtaaaacaacactcttaaatattttgagtggagaagaccaacaattcgaaggtaaattgaagactggacagacggttaaagtagcttattttaagcaaacagatgagaccctggatagagatattcgtatgattgattatttaagagaagaaagtgagatcgcaaaagaaaaagatggaacctcggtatctattacacaacttcttgaacgatttttatttccaagtgcaactcatggtaaaaaagtttataaattatctggtggagagcaaaagcgtttgtatttattacgtctactcgtacaccagccaaatgttctgttgttagatgaaccgacaaatgatttagatactgagactttaacaatacttgaagattatattcatactttcggtggtacagtgattaccgtaagccatgatcgctactttttaaataaagttgcacagtcatattggtttattcatgatggtcagatggaaaagattatcggaacttttgaagattatgaaagttataaaaaatcattagataaaaataaatccacattgaagcaacaatctaaatcttctacaactgtacgtaagaaaaatggtttatcatataaagaaaagttagaatatgaacaattgatgaaacgcatagaacaagcggaagtaagaatggaagaaatagatgtgctcatgattgaggcaagtgcagattatgggaaaattaaagaattaaacgaagaaaaagaacaacttgaaattcaatatgatttagacatcacaagatggagtgagttagaagaaattaaagaacaacaataaggggtcaatttatgatgcaacaaacattatcgcattactttgggtatgaaacgtttcgaccaggacaagaagaaattattagcaaagtattagaccatcgtaatgtgcttggtgtcttaccaactggtggaggtaagtctatatgctatcaagtaccaggtttattgttaggtggtacaacaattgtaataagtccactaatatcattaatgaaagatcaagtggatcaattaaaagcgatgggaattcaagctgcttttttaaatagtagtttgactcaaaaagagcaacaacgtattgaaaaagcattatcaaatggagaaattcaatttttgtatgttgcaccagaacgatttgaaaaccgatattttttaaatatgcttcagcgtataaagattcacttagtcgcgtttgatgaagcgcattgtatttctaaatggggtcatgatttcaggccgagttaccaaaatgttatttcaaaagtatttacgttacctcaagattttacaataatagcgttgacagcaactgccacggttgaagtacagcaagatattagagaaaagttaaatatcgctcaaactgatcaaattaaaacgagtactaagcgtagaaacttaatttttaaagtaaatcctacttatcaacgtcaaaaatttatattggattatattaaaacacatgatgaagatgcaggtattatttattgttctacacgtaagcaagttgaagagcttcaagaagccttagaaagccagaaaattgaaagtgttatatatcatgcaggtttgagcaataaagaaagagaagaagcgcagaatgatttcttatttgatcgtgttaaagtagtcgttgctacaaatgcttttggtatgggtattgataaatccaatgtacgttttgttattcattataatatgcctggagatttagaatcttattatcaagaagccggtcgtgcaggtcgtgacgggttgaaaagtgaatgtattttgttatttagcgaacgcgatatcaatttacacgagtattttataacagtctctcaagctgatgatgactataaagataaaatgggcgaaaagttaactaaaatgattcaatatacaaaaacaaaaaaatgtttagaagcaacaattgtccattattttgaaccgaatgaaaaattagaagaatgtgaacaatgtagtaattgtgttcaacaagataaatcatataatatgacacaagaagctaagatgattattagttgcatcgctcgtatgaaacaacaagagagttatagtgttatcattcaagtgctaagaggagagtcaacagattatattaagtacaaaggttatgatcaaatttcaacccatggtttaatgaaaggttacacaacatcagaattaagtcacttaatagatgaattaagattcaaagggttcttaaatgaaaatgatgaaatattaatgtgtgatacttcaattaaaaaattactcagtaatgaagtagaagtattcacaacaccatttaagcaaaaagcgactgaaaaagtatttataaatacggttgaaggggttgaccgagtattattcagtcagttggtagaagttcgtaaaaagttaagtgacaaattaacgatagcacctgtaagtatattttctgattacacgttggaggaatttgctaaacgtaagcctgcttcgaaacaagatatgattaatattgatggcgtaggtagttacaaattaaaacattattgtccagcatttttagaaacgattcaaaattataaagccaaagtatagtgaagacacctagtaagcattccttgttttactgggtgtttttttgaattcaaggtaaaataacactatttcttaactggagattacctattattcattattttattaaaaaagttcaaggataaatcatttaaatttgaaaattgtaataaacgtggttaaatagggaatacatacatataatctcggttttatgctatgagaaaaaaagaggtggcaaagtgattaagtttaaaaatgtaactaagcgttatggcaaacatgttgctgtcgataacattagtttcaatattaatgagggtgaattttttgtgctaattggaccttcaggttgtggaaaaactacgacattaaaaatgattaatcgactcattcacttaagtgaaggttatatttattttaaagataaaccaataagtgattatccagtatacgaaatgcgttgggatattggatacgtattgcagcagattgcattattcccacatatgacaatcaaagaaaatattgcacaagtgccacaaatgaaaaagtggaaagaaaaagatatagataaaagagtagatgaattacttgaaatggttggattagaacctgaaaaatataaaaacagaaaacctgatgaattgtcaggggggcaacgacaacgtgtaggagttatacgtgcgttagcagctgatccaccagttattttaatggatgaaccgtttagtgcattagacccaatcagccgagaaaaacttcaagatgatttaattgaattacaaactaaaattaagaagacaatcatatttgttacacatgatattcaagaggcgatgaaacttggtgataagatttgtcttttgaatgaagggcatattgaacaaattgacacaccagaaggatttaaaaataatcctcaaagtgaatttgttaaacaatttatgggtagtcatttagaagatgttgcgccatgtgttgaagagaacgcaattatccgtgacttggatattatgaaaccaatcgatgaggttacatctatgagcgcttatccaattgtttatgacaatcaaccaattgaagtattgtatcaacttttatcagagagcgagcgtgtcattgtcatgcaagaagatagcgtaggtcaatatgttattgataggaaagatatcttcaaatatttgtcccagaaaaaggaggtagctcaacatgactaactttttcgacatattgagtgaacgtaaggggcaactcttttcgacaatgatagaacatattcaaatatcatttatcgcattattgattgcaactgctattgcggtaccattaggtattttattaacgaagactaaaacgatatctgaaatcgtaatgaatattgcggcaattcttcaaaccataccatcgttggcattattaggtttaatgattcctttatttggtatcggtcgtgtgccagcaattattgcacttgtagtgtatgcgttgttaccaattttaaggaatacgtatactggaattaaagaagttgatccatcactcattgaagcggctaaaggtataggtatgaaaccatttagacgtttaactaaagtcgaacttccgatagcaatgcctgttataatggctggtgtaagaacggctatggtattaattataggtacagcaacactagcagcattaattggtgcaggcggactaggagatttaattttattaggtatagaccgtaacaatgcatcgttgatattattaggtgcaattccagcagccttattggcaattatatttgatttaattttaagatttatggctaaattatcttataaaaagttattgatgacgttaggtgttatagtgatgattattatactggctatcgctattcctatgtttgcacaaaaaggtgataaaattacgttagctggaaagcttggctccgagccatcgattattacaaatatgtataaaattttaatagaagaagagaccaaaaatactgtagaagtgaaagatggtatgggcaaaacagcatttttatttaatgctttaaaatctgacgatatagatgggtatttagaatttactggaacagttttaggcgaattaacaaaagaaccattgaagtcaaaagaagagaaaaaagtttatgaacaagctaagcaaagtcttgaaaagaaatatcaaatgactatgttaaaaccaatgaagtataacaatacgtatgctttagctgtaaaacgtgattttgctaaacaacataatatacgtacaattggtgatttaaataaggttaaagatcaacttaaaccaggatttacattggaatttaatgatcgtccagatggttacaaagctgttcaaaaggcttataatttaaatttagataacatacgtacaatggaacctaagttgagatatcaagcgatcaataaaggtaatattaatttaatagatgcatattcaactgacgctgaattaaaacaatatgatatggttgtgttaaaagatgataagcacgtatttccaccatatcaaggagcaccattatttaaagaaagctttttaaagaaacatccagaaattaagaaaccgttaaacaaactagaaaacaaaatatctgatgaagatatgcaaatgatgaactataaagtaacagttaaaaatgaagacccatatacagttgcgaaagattatttaaaagcaaaagggttaatcaaataacgaccaacgccacataagatgcgtaacaccaaattatatcttatgtggcgttgttatatttaaatctataattatgttcaatttaaacatgcaataatgattaaaaaatatgacatgttaaacacaatgtaagctattatgatgtgaaaatagtagcattgcattttagaaacatagagcgatataatgaatataagttttttaaaatttcagttaattctaaggaggttgtttttattatgaaagaacaacttaatcaactatcagcatatcagcctggtttatctccaagggcattgaaagaaaagtatggcattgaaggagatttatataaacttgcatcaaatgaaaatttgtatggaccatcgcctaaagttaaagaagcgatatcagcacacttagatgagttatattattatcctgaaacaggatcaccgacattaaaagcggcgattagtaaacatttaaatgtagatcaatcacgcattttatttggtgcgggattagatgaagttatattaatgatttctagagctgtattaacgccaggggatactattgttacaagtgaagcgacattcggtcaatattatcacaatgcgattgttgaatcagctaatgtgatacaagtacctttaaaagatggtggcttcgatttagaaggtattttaaaagaagttaatgaagatacgtcattggtatggttatgtaatccaaataatcctacaggtacatattttaatcatgagagcttagattcgtttttatctcaagtacctccacatgtaccagtaattatagatgaagcttattttgaatttgtgacagaagaggactacccggatacacttgctttgcaacaaaaatatgacaatgctttcttattacgtacattttcaaaggcgtatggattagcgggtttacgtgtaggatatgtggtagcaagtgaacatgcgattgaaaaatggaacatcattagaccaccatttaatgtgacacgtatatctgaatacgcagcagttgcagcacttgaagatcaacaatatttaaaagaggtaacacataaaaatagtgttgaacgcgaaagattttatcaattacctcaaagtgagtatttcttgccaagtcaaacgaattttatatttgtaaaaacaaagcgggtaaatgaactttatgaagcacttttaaatgtagggtgtattacgcgaccatttccaactggtgttagaattacaattggttttaaagaacaaaatgataaaatgttagaagttttatcaaactttaaatacgaatagtaagtgcaggctgggacataaatcaatgttctgtgctctacgaagttatattggcagtagttgactgaacgaaaatgcgcttgtaacaagcttttttcaattctagtcaaccttgccggggtgggacgacgaaataaattttgcgaaaatatcatttctgtcccactcccaatgcagtgtgaatgatgaggtgagagtattcagtgtaaaaagcaacaatagatgatattgttttgtatcaattgcttttttgctatactgaatcaatactgatattttgaggagaagattaaaatgacccgtaaatcaatcgcgattgatatggatgaagtattggcagatacattaggagaaatcattgatgctgtcaattttagagcggatttaggtattaaaatggaagctttgaatggtcaaaaacttaaacatgttattcctgaacatgatggattaattacagaagtattgagagaaccaggcttcttcagacatcttaaagtgatgccgtatgcacaagaagttgtgaaaaaattaactgaacattatgatgtatatattgctacagcagcaatggatgtaccaacatcatttagtgataaatatgaatggttactagagttctttccatttttagatcctcagcattttgttttttgtggtagaaaaaacatcgttaaagctgattatttaatagatgacaatcctagacagcttgaaatttttactggtacaccgattatgtttacagcagtgcataatattaatgatgatcgatttgaacgcgtaaatagctggaaagatgtagaacagtattttttagataatattgagaaataaaaatatatcacttgaaaaatttcatgtagtaaagatgatggataggctataaagtaattgtgacttggttgaacttttatgtcttagacactacaacactatattggcagtagttgactgcggggccccaacataaagaaattggaacgccaatttctacagacaatgcaagttggcggggccccaacatagagaaattggaacgccaatttctacagacaatgcaagttggggtgggccccaacataaagaaatactttttctttagaaattagtatttcttatgcatgagtgtaactcatgcattcatatttttaagtacacattagctgtgactaatgataaagaatcgctacataatcaatcattagtcgttctttatcatttccgtcccgctctcaataaatgttagtctatcttattattataaatcggatgaatgtgttaatctatggcagattacacgtcatccgattttttatagaatttgaaaaagacgcataaaccactatgatttaaaatacaacatcaatcattttagtggcatgcgccaaaattatatgtctgtttttgaaacagggtaatagcttaaagctaataaaaacgaatataaggtgcgttgaatcttatgattacactccaaacctaatataatatcgggttaagatcattccggatgcttacaaatcattgacagtaagtaactgaatggcatttggtataacctcaatatcaataggtgtttctaatgaaatttcgccatcaatatcaactttcattgctggatctgttgtaagtgaaatctttttaccaggtatatgctcaataccttgagtaatttcattccaattcatgctatcacgctttttaaaaatatcatttaaaatactgaaactttgttcattaaaaatgaaagtgttcagttcaccatcttgaggagacaaatcagtcaatggtatacgactaccaccaatgaatggaccatttgctgttagtatcatggtcgtttcgccagaatatgtcttatcatctattgataattgataattaaattgtgttggatttagcagtgttttgacagttgatccaatataactcaatttaccaaatatatcttttgaaccatcttgtacgttttcagcgttttgaacaatgagacctaagccaacaaagttgagtgcatattgattatttattttaattacatcgtatttaccaacttgtgcagaaatcatttgttcactagcttgtttatgattaggtgctatatttagcgtttttgtaaaatcattaaaagtaccgcctggtaaaatgccaatagggagttgaaggtcatgtgtcataacaccgtttataagttcgttaaccgtgccatcaccgccaagaataaataatatatctacatcttttgcatagtttttagttttgatttcttggcaatatttaataatgtcaccttcgttttcactcaattgaatagaaagatgcttacaaattgaacttaatgctgttgtaacttccccaataccttgattaatattttttaatccactgtgttcatggtaaaagaggacaccatgtgtatatttattttccatagtttagcctactttctaaaaattggttcattaaatatatatacccacttttaattgttaataccaaaaatatgttttaaatagagaaaatggtaataactgacattgatgtctatagagtgggacgagaaaatatagttatagctgtctataacgagcatattaagcttttatttatactgatatcttgaatttaattaatagaaacctataaaaaaacagtaagccatttaaatgacttactgttttttgaattaggccaacaatattaacgtatacctttcatcgctttgatgattaaaggtgagaatgctaatacaattgttgtaacaataattgcaacaacacctaggaaaataaagtaatttgtttgacctagtggttctattaacttaactaaagtaccattgattgcttgtgcagaagcgttagttaagtaccaaatactcatcatttgggcattaaatgctttaggtgctaacttaacagcagcactattacccgttggtgataagcatagctcaccgataacacaaataatgtacgataaaataacccagttaactgaaaagtttgatgaacctgatgcataacctacaataccaattagtatgtatgacgcacctgctaagaacgtaccaattgcaaattttactggcaggctaggttgtttagttccaagcttttgccataaaagtgaaataattggagctagtaataaaataaataatgggttaattgattggaagatcgcttcaccaaagtttgttttccaaccaaataagtttaatttcatatctgaatgttcaattccatatatgtttaatacattagacccttgttcttgaatagcccagaacaccattccaagaataaataatggaataaatgctttaacacgagaacgttcagtatcagtgacatctttacttctaataattaaagtgaagtaaatgattggtaatgcaatacctaatactaaaacagtattactaactaagttaaatgataatgagttagttaatgcaccaataacgataattaatacaattgctaaaacaacacttccgataataagaccatactttttcttttcagctggtgtcaatgggttagtaggtttcataccaacgctacctaagtttttgcggttgaaaagtacataccatactaaacctaatgccataccaactgctgcaatcaagaatccgccgtggaagtttttaacattaacaaagtgttgcaaaataataggtgataataatgcacccatattaactgacatatagaaaataacaaaacctgcatccatacgtctatcattttcaggatataaacggccaacgatatttgaaatgtttggcttcattaaacctgaaccaataatgatgaagaacattgatgtgaataagccgattaatgcaaatggtaagcttaaacaaatatgtccgataataataaagactgcacctaataaagtagcgcctctagtacctgtaattctgtcagcaatccatccgcctggtattgatgtcatatagattaatgaaccataaactgacataattgacatagctgttgttttatcaattccaaggccattatctgttacggcaaagtacatgtagaaaatgagtagggcacgcatgccataataactaaacctttcccagaactctacaaagaagagtacgcctagtcctcgaggatgcccgaaaaatcctgtttgaggtatgtcttgaatttgatttccatgggagttttgttgtgtcatgtatacatcccatcctttcttcccctaatacaatagtttaagtaaatttgattgtgccttatcaactaaatattccaacaaatcacaaaaaaataaaaatattgagaatattctgttattaagcgcgcacaattaattagagataatataaaaatatacttattgacgttaaagtgcaataggtttctataaaaatgttgtttaattcgtgtactaatattcttttggtgtactttggtataaaatgttattttaatgtaacctattatgtatgctaaatgaaaaacacaccaataagttaggaaaatcaacttattggtgtgtttattaaatgatacatttaacgattatctattttttcgggatataaatcatgattcatcaaacgatgctcagccattttttcatatttagaatttggacgtccatagtttgtataaggatcaatagaaattccaccacgtggtgtgaacttgccccagacttcaatataatgtgggtccataagctctatcaaatcattcataataatattcatacaatcttcgtgaaaatcaccgtgatttctgaaactaaataagtataatttcaaagattttgattcaaccattttaacatttggaatatatgaaatatagatagttgcaaaatctggttgcccagtaattggacataatgatgtaaattctggacagttgaattttacgaaatagtcacgaccttgatgcttattatcaaacgattctaatacatcaggacgatagtcaaaattgtaagtattgtcttgatttcctaataaagttatatcttgtaattcatcttgttgacggccatgtgccatataaagcgctcctttaaatttatttttttattattttggcgtctcggcgtgctttttcaaacatgtaataacttgcaccgataataacgacgtaacctaatgttgcatagaaatctggagattctccgaatagaataaatccaagtattgctgtgaaaattatagatgcatacgtgaaaatagaaatatcttttgctgctgcaaaactatatgctaatgtaacaccaatttgacccacagcggcagctaagccagcccctaatagataaagtatttgcatctgactcattggttcataggtatatgcagtgaaaggtattaaaacgatgacagaaaataaggagaagtaaaatactatagtatatggtgcttctcttgtactaagtgctcgaacacatgtatatgctgatgctgcaaaaatacctgagaataagccagctaatgatggaatcatagatgatgaaaattcaggtttcactattaaaagcatacctaaaatagcaattatcattgctgtaatttgatacttccttaccttttcatgtaagaaaacaatgcttaataaaatcgtccagaaaggattgagtttcattaatgaatcggcatcactaagtaccatatgatcaatggcataaatatttaacaatacaccaataagtccaagtgttgatcgtgttattaataagggttgacttgaaagtctgccaaacattggctgatggtatttatatataaaaaataatggaataaacattgctactaagtttcgtgctaatgatttttgaaaaacaggaaggtcacctgcaagtctgaaaaacactgacataaaactgaaaccaatagccgaaattaaaatggcaatgataccttttactttaggattcaattttatcgcctcttttatataaaattaacgtatttatattagcataaaacaacatgttgtgcataaatagttgaaatttactataaaaagactataatagactgtaccgaacaaatgttctgtgtttatttgtcggaataatagggcattacacttttatgaatgtttgtgttattacataaaacaaatatcaattcagtatcaagctaataagctttttcttgatttctgttgatacaattgagattgacacagatttaaaaaaatcaagtgatatctactaaaaaatttttttaaatttgttcaagtttttctaatttagtattggtgcctagttggaacgttttacgaacattcgattagaaaatggcactttaaatcatagtgtgtcttatgtataatgaaacacataatatagtgttggtgaaacgaaaaagacacaatatcttgtgttttgtatgcaaatgctttatttatgaagaaattacatttaaaagtaatttaacacagaaatttaatagttattatcaattaatagtcatatttttagaaaatgtactgagcaaatggaagatatccaatgatgtaaatactacatatagtgatttttatacattcaacccatataagctactattttctcaaatataaatctatgcaattggtttacatttgagaaaataagtagcttcattatagttaatacaatgctgagataaccatagtaaccatgttgttaaagcattttttaattggaatgactactttatttaaaagggttgaagaaagaaggtgatccaatgaaaataatatatttttcatttactggaaatgtccgtcgttttattaagagaacagaacttgaaaatacgcttgagattacagcagaaaattgtatggaaccagttcatgaaccgtttattatcgttactggcactattggatttggagaagtaccagaacccgttcaatcttttttagaagttaatcatcaatacatcagaggtgtggcagctagcggtaatcgaaattggggactaaatttcgcaaaagcgggtcgcacgatatcagaagagtataatgtccctttattaatgaagtttgagttacatggaaaaaacaaagacgttattgaatttaagaacaaggtgggtaattttaatgaaaaccatggaagagaaaaagtacaatcatattgaattaaataatgaggtcactaaacgaagagaagatggattctttagtttagaaaaagaccaagaagctttagtagcttatttagaagaagtaaaagacaaaacaatcttcttcgacactgaaatcgagcgtttacgttatttagtagacaacgatttttatttcaatgtgtttgatatttatagtgaagcggatctaattgaaatcactgattatgcaaaatcaatcccgtttaattttgcaagttatatgtcagctagtaaatttttcaaagattacgctttgaaaacaaatgataaaagtcaatacttagaagactataatcaacacgttgccattgttgctttatacctagcaaatggtaataaagcacaagctaaacaatttatttctgctatggttgaacaaagatatcaaccagcgacaccaacatttttaaacgcaggccgtgcgcgtcgtggtgagctagtgtcatgtttcttattagaagtggatgacagcttaaattcaattaactttattgattcaactgcaaaacaattaagtaaaattgggggcggcgttgcaattaacttatctaaattgcgtgcacgtggtgaagcaattaaaggaattaaaggcgtagcgaaaggcgttttacctattgctaagtcacttgaaggtggctttagctatgcagatcaacttggtcaacgccctggtgctggtgctgtgtacttaaatatcttccattatgatgtagaagaatttttagatactaaaaaagtaaatgcggatgaagatttacgtttatctacaatatcaactggtttaattgttccatctaaattcttcgatttagctaaagaaggtaaggacttttatatgtttgcacctcatacagttaaagaagaatatggtgtgacattagacgatatcgatttagaaaaatattatgatgacatggttgcaaacccaaatgttgagaaaaagaaaaagaatgcgcgtgaaatgttgaatttaattgcgcaaacacaattacaatcaggttatccatatttaatgtttaaagataatgctaacagagtgcatccgaattcaaacattggacaaattaaaatgagtaacttatgtacggaaattttccaactacaagaaacttcaattattaatgactatggtattgaagacgaaattaaacgtgatatttcttgtaacttgggctcattaaatattgttaatgtaatggaaagcggaaaattcagagattcagttcactctggtatggacgcattaactgttgtgagtgatgtagcaaatattcaaaatgcaccaggagttagaaaagctaacagtgaattacattcagttggtcttggtgtcatgaatttacacggttacctagcaaaaaataaaattggttatgagtcagaagaagcaaaagattttgcaaatatcttctttatgatgatgaatttctactcaatcgaacgttcaatggaaatcgctaaagagcgtggtatcaaatatcaagactttgaaaagtctgattatgctaatggcaaatatttcgagttctatacaactcaagaatttgaacctcaattcgaaaaagtacgtgaattattcgatggtatggctattcctacttctgaggattggaagaaactacaacaagatgttgaacaatatggtttatatcatgcatatagattagcaattgctccaacacaaagtatttcttatgttcaaaatgcaacaagttctgtaatgccaatcgttgaccaaattgaacgtcgtacttatggtaatgcggaaacattttaccctatgccattcttatcaccacaaacaatgtggtactacaaatcagcattcaatactgatcagatgaaattaatcgatttaattgcgacaattcaaacgcatattgaccaaggtatctcaacgatcctttatgttaattctgaaatttctacacgtgagttagcaagattatatgtatatgcgcactataaaggattaaaatcactttactatactagaaataaattattaagtgtagaagaatgtacaagttgttctatctaacaattaaatgttgaaaatgacaaacagctaatcatctggtctgaattagcagatgattagactgctatgtctgtatttgtcaattattgagtaacattacaggaggaaattatattcatgatagctgttaattggaacacacaagaagatatgacgaatatgttttggagacaaaatatatctcaaatgtgggttgaaacagaatttaaagtatcaaaagacattgcaagttggaagactttatctgaagctgaacaagacacatttaaaaaagcattagctggtttaacaggcttagatacacatcaagcagatgatggcatgcctttagttatgctacatacgactgacttaaggaaaaaagcagtttattcatttatggcgatgatggagcaaatacacgcgaaaagctattcacatattttcacaacactattaccatctagtgaaacaaactacctattagatgaatgggttttagaggaaccccatttaaaatataaatctgataaaattgttgctaattatcacaaactttggggtaaagaagcttcgatatacgaccaatatatggccagagttacgagtgtatttttagaaacattcttattcttctcaggtttctattatccactatatcttgctggtcaagggaaaatgacgacatcaggtgaaatcattcgtaaaattcttttagatgaatctattcatggtgtatttaccggtttagatgcacagcatttacgaaatgaactatctgaaagtgagaaacaaaaagcagatcaagaaatgtataaattgctaaatgacttgtatttaaatgaagagtcatacacaaaaatgttatacgatgatcttggaatcactgaagatgtgctaaactatgttaaatataatggaaacaaagcactttcaaacttaggctttgaaccttattttgaggaacgtgaatttaacccaatcattgagaatgccttagatacaacaactaaaaaccatgacttcttctcagtaaaaggtgatggttatgtattagcattaaacgtagaagcattacaagatgatgactttgtatttgacaacaaataacaattaaattaaaagaccttcacatgtaaagggaaatagcgattcgtttcgtcttgtctcctacatgttgaaggtctttttttatgtgtatctaactcattatgagtctgagtaagaaatcaatgctctaagatgtacaatgttatttatattggcagtagttggcggggccccaacacagaagcaggcggaaagtcagctaacaatattgtgcaagttggcggggccccaacatagaagcagacggaaagtcagctaacaataatgtgcaagttggcggggccccaacataaaagcaggcggaaagtcagctaacaatattgtgcaagttcgggcggggccccaacataaagaaaaactttttcctttagaaattatcacttccacatgagttttactcatgtattcctatttttaagtacacattagctgaggctaatgttaagaaccactacataatcaatcattagtagtttttatcatttccactattcccagacatcaaaatcttaagtgttctattttactttaagcaaacaaaatacacattccgaaaaattaaatttcagtttaattgcaaatatcaataaaattgacactaaattatttgaaaggctattgaaattatggtcaaaaaacgctactattaatgagaaatattatcaatgataatgattatcattaatttaaagggagaaaaatttgtaatgaagtatttattaaagggaaatattttgcttctattactaatattgttgacaattatttcgttgttcataggtgtgagtgaactatcaattaaagatttactacatttaactgagtcacagcggaatattttattctcaagccgaataccaaggacgatgagtattttaattgctggaagttcgttggctttagcaggcttgataatgcaacaaatgatgcaaaataagtttgttagtccgactacagctggaacgatggaatgggctaaactaggtattttaattgctttattgttctttccaaccggtcatattttattaaaactagtatttgctgttatttgcagtatttgcggtacgtttttatttgttaaaatcattgattttataaaagtgaaagatgtcatttttgtaccgcttctaggaattatgatgggtgggattgttgcaagtttcacaaccttcatctcattgcgcacgaatgctgttcaaagcattggtaactggcttaacgggaactttgccattatcacaagtggacgctatgaaattttatatttaagtattcctcttttagcattgacatatctttttgctaatcatttcacgattgtaggaatgggtaaagactttactaataatttaggtttgagttacgaaaaattaattaacatcgcattgtttattactgcaactattacagcattggtagtggtgactgttggaacattaccgttcttaggactagtaataccaaatattatttcaatttatcgaggtgatcatttgaaaaatgctatccctcatacgatgatgttaggtgccatctttgtattattttctgatatagttggcagaattgttgtttatccatatgaaataaatattggtttaacaataggtgtatttggaacaatcattttccttatcttgcttatgaaaggtaggaaaaattatgcgcaacaataataaaaaaataatgcttttaattgcagtaacgttattaattagtatgctgtacttatttgtaggtattgattttgaaatatttgaatatcaattttcaagtcgtttaagaaagttcatattaattattttagtaggtgctgccattgcaacttcagtggtgatttttcaagcgattacaaataaccgtctattgacaccatcaataatggggttagatgcagtttatttatttatcaaagtattgccagtctttttatttggaattcaatcggtatgggttactaatgtatatttgaactttatattaacacttataacgatggtgttattcgcactaatcctattccaaggtatctttaaaattggacatttttcaatttattttatcttacttattggtgtccttttaggaacattttttagaagcataacaggttttattcaactgattatggatcctgagtcatttttagcaatacaaagtagtatgtttgctaattttaatgcttctaattcgaatttagttattttctcagcagtgctattagtaatcttattagtcattacaattttactattgccttatttagatgtattgcttttaggtcgtgctgaagcaattaatcttgggatatcgtatgaaaaattaacgcgaattctacttgtaatagtctcagttttagtttctgtgtcaactgcattagtaggaccaattacatttttaggtttattaactgtaaatctagcgcatgaactaatgaagacgtatgaacataagtatattttaattgcgacaatttgcttgagttggattagtttatttagtgcgcaatgggtagttgaaaatgtgtttgaagctacgacagaaatgagtatacttattgatttgattggtggaagttatttcatttatctattagttagaaggagaaatgcgcaatgattcaagttgaaaatttaactaaaactataaataatcaaatgatattggaagatattagcatagatatcgaaaaaggtaaattgacttctttaattggacctaatggtgcgggtaagagtactttactttcagcgatatgtaggttaattcgttttgataacggtgaagtgaaaatagatggacagctcatgtctgattataaaaataatgacttgtcgaaaaaaatatctatattaaaacaaacaaaccatactgaaatgaatattacggtagagcagttggtaaactttggacgattcccttattctaaaggtcgtttgacgaaagaggatcatgatattgtcaatgatgcgctagatttgttgcaactacaagatatcagaaatcgtaatattaagtcattatctggtggacaacgtcagcgtgcatacattgcaatgacaatagcacaagatactgaatatattttgctagatgaaccattaaataatttagatatgaagcatgctgttcaaattatgcaaacgttaaaaatgttagcgcataaaatgaataaagcgattgtcattgtgttacatgatattaactttgcgtcctgttattcagatcagattgtagcattgaaaaacggacaactagttaagtcagatttgaaagataatgtcattcaaagtagtgttttaagtgatttatatgacatgaatattcaaattgaacatataagaaatcaaaggatttgtttatattttaaggattgataatttggagacactttaaaggggtgatgcgccaattaaagaagggttaaacgtaaagcatttatttatatttcacatcaagcacacagattaagccaaaagaggagaatattatattatgaagaaaacagtcttatatttagtattagcagtaatgtttttattagcggcatgcggtaacaattctgataaagaacaatcaaaatcagaaactaaaggttctaaagatacagtaaaaattgaaaataactataaaatgcgtggcgagaaaaaagatggtagtgacgctaaaaaagttaaagaaactgttgaagtaccaaaaaatcctaaaaatgcagttgtgttagactatggcgcattagatgtaatgaaagaaatgggcttatcagataaagtaaaagcattacctaaaggggaaggcggtaagtcattaccgaatttcttagaatcatttaaagatgataaatatacaaacgttggtaatttaaaagaagtgaattttgataaaattgctgcgacgaaacccgaagtaatctttatctctggacgtacagctaatcaaaagaatttagatgaattcaaaaaagctgcacctaaagcgaaaattgtttatgttggtgcagatgaaaagaacttaattggttcaatgaaacaaaacactgaaaatatcggtaaaatttacgataaagaagataaagctaaagaattaaataaagatttagataacaaaattgcttcaatgaaagataaaacgaaaaacttcaataaaactgttatgtatttactagttaacgaaggtgaattatcaacatttggacctaaaggtcgttttggtggattagtttacgatacattaggattcaatgcagttgataaaaaagtaagtaatagcaatcatggacaaaatgtttctaacgaatatgttaataaagaaaatccagatgttattttagcgatggatagaggtcaagcgataagtggtaaatcaactgcgaaacaagcattaaataatcctgtattaaaaaatgttaaagcaattaaagaagacaaagtatataatttagatcctaaattatggtactttgcagctggatcaactacaactacaattaaacaaattgaggaacttgataaagttgtaaaataattttaaaagaggggaacaatggttaaaggtcttaatcattgctcccctcttttctttaaaaaaggaaatctgggacgtcaatcaatgtcctagactctaaaatgttctgttgtcagtcgttggttgaatgaacatgtacttgtaacaagttcatttcaataccagtgggctccaaacatagagaaatttgattttcaatttctactgacaatgcaagttggcggggcccaaacatagagaatttcaaaaaggaattctacagaagtggtgctttatcatgtctgacccactccctataatgttttgactatgttgtttaaatttcaaaataaatatgatagtgatatttacagcgattgttaaaccgagattggcaatttggacaacgctctaccatcatatattcattgattgttaattcgtgtttgcatacaccgcataagattgctttttcgttaaatgaaggctcagaccaacgcttaatggcgtgcttttcaaactcattatggcacttatagcatggatagtatttattacaacatttaaatttaatagcaataatatcttcttcggtaaaataatggcgacagcgtgtttcagtatcgattaatgaaccataaactttaggcatagacaaagctccttaacttacgattcctttggatgttcaccaataatgcgaacttcacgatttaattcaatgccaaatttttctttgacggtcttttgtacataatgaataaggttttcataatctgtagcagttccattgtctacatttaccataaaaccagcgtgtttagttgaaacttcaacgccgccaatacggtgaccttgcaaattagaatcttgtatcaatttacctgcaaaatgaccaggcggtctttggaatacactaccacatgaaggatactctaaaggttgtttagattctctacgttctgttaaatcatccattttagcttgtatttcagtcattttaccaggagctaaagtaaatgcagcttctaatacaactaagtgttctttttgaataatgctattacgataatctaactctaattcttttgttgtaagtttaattaacgagccttgttcgtttacgcaaagcgcatagtctatacaatctttaacttcgccaccataagcgccagcattcatatacactgcaccaccgattgaacctggaataccacatgcaaattcaaggccagtaagtgcgtaatcacgagcaacacgtgagacatcaataattgcagcgccgctaccggctattatcgcatcatcagatacttcgatatgatctagtgataataaactaattacaatgccacgaataccaccttcacggataataatatttgagccatttcctaaatatgtaacaggaatctcattttgataggcatatttaacaactgcttgtacttcttcatttttagtaggggtaatataaaagtcggcattaccacctgttttagtataagtgtatcgttttaaaggttcatcaactttaattttttcatttgggataagttgttgtaaagcttgatagatgtctttatttatcacttctcagtacatcctttctcatgtctttaatatcatatagtattataccaattttaaaattcatttgcgaaaattgaaaagaaagtattagaattagtataattataaaatacggaattattgtcgttataagtattttttacatagtttttcaaagtattgttgcttttgcatctcatattgtctaattgttaagctatgttgcaatatttggtgcttttttgtatggaattgcaaagcaatatcatcattagttgataagaggtaatcaagtgcaagataagattcaaatgtttgggtattcatttgaatgatatgtagacgcacctgttgttttagttcatgaaaattgttaaacttcgccatcataactttcttattatatttatgatgcaagcgataaaaccctacataatttaagcgtttttcatctaaggatgtaatatcatgcaaattttctacacctactaaaatatctaaaattggctctgttgaatatttaaaatgatgcgtaccgccaatatgttttgtatattttactgggctgtctaagaggttgaataataatgattcaatttcagtgtattgtgattgaaaacaattagttaaatcactattaatgaatggttgaacatttgaatacatgataaactcctttgatattgaaatttaatttaatcacgataaagtctggaatactataacataattcattttcataataaacatgtttttgtataatgaatctgttaaggagtgcaatcatgaaaaaaattgttattatcgctgttttagcgattttatttgtagtaataagtgcttgtggtaataaagaaaaagaggcacaacatcaatttactaagcaatttaaagatgttgagcaaaaacaaaaagaattacaacatgtcatggataatatacatttgaaagaaattgatcatctaagtaaaactgatacaactgataaaaatagtaaagaatttaaggcactacaagaagatgttaaaaaccatctcatacctaaatttgaagcatattataagtcagcaaaaaatttgcctgatgatacaatgaaagttaagaaattaaaaaaagaatatatgacgcttgcaaatgagaagaaggatgcgatatatcaattaaaaaaattcataggtttatgtaatcaatctatcaagtataacgaagacattttagattatacgaaacaatttgaaaaaaatagatacaaagttgaatcagaaattaaattagctgataataaaagtgaagcaactaatcttacgacaaaattagaacataataataaagcgttaagagatactgcgaagaagaacctagatgatagtaaagaaaatgaagtaaaaggcgcgattaaaaatcacattatgccaatgattgaaaagcaaattaccgatattaaccaaactaatattagtgataagcatgttaataatgcaaggaaaaacgcaatagaaatgtattacagtctgcagaactattataatacacgtattgaaacaataaaggttagtgagaagttatcaaaagtcgatgtagataagttgccgaaaaagggtatagatataactcacggcgataaagcctttgaaaaaaagcttgaaaaattagaagaaaaataactataatcatttttcaaagttaaaaattttgaatttatggttaacatgtcaacttactatgtgtataatggtaaacattgatattaactatatgtataaaaatgtcacgcagatgctatttaaatgtgataaatatttttagaggtgaatagagtggctataaagctaagttcaattgaccaatttgaacaggttattgaggaaaataaatatgtttttgtattaaaacatagtgaaacttgtccaatatcggcaaatgcgtacgatcaatttaataaatttttatatgaacgcgatatggacggttattatttgattgtccaacaagaacgcgatttgtcagattatattgctaaaaaaacgaacgttaaacatgaatcacctcaagcattttattttgtaaatggtgaaatggtttggaatcgagaccacggtgatatcaatgtgtcgtcattagcacaagcagaagaataatgaaactatagggttggaacattttgccttacactactagacgtgaatagcacaacttaaattcgtgtgaatcagagtagtttggctataatgatgttctgaccttttattttatgtcacctttagaagcagttaagttagtacttttttacaaacatatgtataatgtattcgagtatttttattgaaaatattttggaaaacgacgaatccaataagaaaatttaaacatgatttgtaagttagtttaataggaaatatatgctaaaccaaaagaagcatattgttatttactggaataattaataatcatgtcatgttaaatgttcgcatataatcacgagataaaatctaaaatttaagattaatcttttatgaataaaaaacgtatcacaacaaataataaagtaaggtggtcaaggttatgaaagtattagtagccatggatgagtttcatggaattatttcgagttatcaagctaatagatatgttgaagaggcagttgcaagccaaattgaaactgcagatgtagttcaagtaccattgtttaatggaagacatgaattattagattctgtatttttatggcaatctgggcaaaagtatcgtataccagtacatgatgcagatatgaatgaagttgaaggtgtttacggacaaactgatacagggatgaccgttatcgaggggaatttatttttaaaaggtaaaaaaccaattgttgaacgaacaagttatggtttaggagaaatgattaaacatgcattagataacgacgcaaaacatgttgtaatttcactaggtgggattgatagttttgatgctggtgcaggtatgttacaagcattaggtgctcaattctatgatgacgaagggcgtgtcgtagatatgagacaaggtgctggtgtaattaaatatattcgtcgtatggatatgtcgaacttacaccctaaaatggaaacagcaagaattcaagtaatgtcggatttttcaagtcgattatatggtaagcaaagtgaaatcatgcaaacttatgatgcgcatcagttgaatcataatcaagcagcagaaatcgataatttaatttggtattttagtgagttatttaaaagtgaattgaaaattgcaattggtccagttgaacgtggtggtgctggtggtggaattgcagcagtcttgaatggactgtatcaagctgaaatattaaccagtcatgcattagtagaccaactaacacatttagaaaatttagttgaacaagcggatttaattatttttggagaagggttaaatgaaaatgatcagttgctagaaacgacaacattgcgtattgcagaactttgtcataaacatcaaaaggttgccattgcaatttgtgcaactgctgaaaagtttgatttatttgaatcacaaggggttacagcaatgtttaatacatttatcgatatgccagaaacttatactgactttaaaatggggttacaaattaggcattatacggttcagtctttaaaactgttgaaaacacattttaatgttgaggtttagtaaagaaggactaaattggtgatgctgtcatgttggttaataacatttatgatggttagcaaaacgaattagaagatcgaaagtatacgtaaaaaatatgaaaaatcacgctatcattgcactgaatgttagcgtgatttttttattaattaagcctgagttggtatataatcgttggtttttagtgattttcagcgatatcttctacaattccaatgattacttgtactgctttttccataacatcaatggatgcatattcatatgggccgtggaagttaccgcaacctgtaaagatgtttggagttggtaaccccataaatgacaattgtgaaccatctgtaccaccgcgaataggttcagtgtttgctggaatatctaatttggcaaagacacgtttaggtatatcaataatatgaggcaatggtaatattttttctgccatattgaaatattgatccgatatatcaactttaactggataattttcaaaatgggcattgatatcgtcacgtatttctaaaatacgtttcttacgcaattcgaattgttttttatcatgatcacgaataatgtattgcaaagttgctttttcaacagttccttcaaagttcattaagtgataaaagccttcgtatccttctgttcgctccggaacttcactatcaggtagcaaactatcgaattgttcacctaaacgtattgcgtttaccattgcatttttagctgaaccaggatgaacatttacaccgtggcatgtaataaccgcttcagcagcgttaaagctttcatattgtaattctccatattgactaccatccatagtataagcaaaatcagcattgaagcggtcaacatcaaatttatgtggaccacgaccgatttcttcgtctggtgtaaatccaatgcgaatggtaccatgtttaatttctggatgttcttgtaaataacaaatagcttccataatttccacaatacccgctttatcgtctgcacctagtaacgatgtaccatcagttaccattaatgtatgaccaactaaactgttaagttctggaaatactttaggatctaagacacgtttagtattgcctagtttgtatggcttaccatcatagttttcaataatttgcggtttaacatttgaagcattgaaatcaggtgatgtatcaacatgcgccaaaaatccaactgttgggacatcgacatcgatgttactttctaatgtagcaaataagtagccattttcatctaaatcagttggcaatcctaattgttgtaattctttttctaataaatgtaacaaatcccattgcttttcagttgaaggtgttgttgtagattttggatcagattgcgtatcaattgtcgtatatcttgttaatctatctatcaattggttcttcattatattcgaccccttaaactctattattcatgttgtaagattttttatatgtcttacctttgattttaccatacagttgtttgatacgtgtgtataggtaatatagaatttcagaaactaatataccgaaagcaatcgcacctgaaatcagtgtaacttctaaaaatgtatttacagcacttgtataatcatttgatactaaaaaacgagtcgcttgataagctgcaccaccaggtactaatggtataatgcctggcactatgaatataattaccggtcgtttatatctgcggctcatagtatgactcattaagcctaaaattaagcttcccaaaaatgaagcgccaacttttccaaactctaaatctaccgttaattggtaaatcgtccatgcaatggcacccacaaatccacatgctactaagaggcgtttgggtgcattgaaaatgatagagaaaagtactgttgatataaagctgattgtaaaatgaaataaataaaatagcatgctttaacagtccttccttaaatgattaataaaacgattgcgacaccagcaccgattgcgaatgctgttaatgcagcttcaacaccacgagacatacctgcaagtaattcacccgctaataaatctcgaatggcattggtaattaatataccagggacaagtggcatgacactggctatagtaatgatatcttgattggttgcaatgcctaatttagtaaatgtggctgcaatggatatgaccacagcggctgcaacaaactctgagaaaaatttaatttgtatatagcgttgcacaaagctgaatgttaaaaatgcggatccgccagcaatgactgcaatccaacaatctgatgcgacaccaccaaacataaataggaagaagccacatgcaatggcagctgcaaagaaattcgttaaaaaagaatattgtaatgatgcatgctgtaaatgaataaattcagatttagcttcatcaattgtgagttctttatttgatattttacgtgaaagactattcgttaaagcgattttctctaaatctgttgtacgctcttgtacacgaattaatcttgtacttgttcgatcgtttaatgaaaaaataattgcagttgaactgacaaaactatatgtattatgaagaccataactatgtgcgatacggttcattgtatcttcaactcgatatgtttcagcacctgattcaagtaaaattctacctgcaattaatacaacatcaatcactttgttttcatctataattgtgattgaatctggcatatcaattcacctccaatgatatgtgttatttatttgaacaattgaagtttacaacttgttgttgcaactttcaatagtgagactttgtgttagtatgatgaacttgtatggttcaaatttaaataagaaaaactgttaatctttgctattatactatgatttaataatagcaaaggattaacagttttgtcgttgttataaattgataatagggttaaacattactttgtttcgcccttgatttttggctacatgcaccatatcgtctgcatctttaaacactttacgctgtgattttggatcgtcatctgttaaatatccaacaccgatagacactgacaatttaataacttctttgtttggtaaatggaatgatgatttttcaacacccgaacgaatattttcagccaatttaacactttgatcaagtgaataattgtgaatgacaactgagaactcttcgccaccatttctaaaaattttaaattgattcggcacatagtttttaagtaattgagacatttgttttaatacagcatcacctgatttgtgtgagtaggtatcattgacatctttaaatccatcgatatcgattaataataaagcgatactttgatgttctttttcagcttttcgtgaaatttcatttaaatgtctatcaaattcttttacattacctaagcctgttaagtaatcatatttatcttcgttttcataacgatttacgagtgagaagaaatgccaaatatcgacaaatgttatcgctgaagctaaagtgataattaatgaaattggtattaaaatgataacttccgatagtgtgtaaataggactcactaacgcgacaccaaataaaatgattattgtaacaacattaagtattaataatgatagcacatcattttgttttaaaaatggtccaatagcacttgttactgcagcaataacaatcaacgtaacaccgtacataatcgagttgttaaatactacaatttcaacaattgctacaattactgtggcagataatgtatagaccatatttgtaaatctacctaaaaacaataaaggaacgaatgttaagtgaattaaataatcttcacgataagggatagggtagacagataataataatgatacgattgtcattaaaacagtgacataagccttagaaaaaaccatacgtttgttttctgaatactgtaagcgatggaataaatagattccagcgactataacagatatattgtatataaatgcttcgaacatgtctgaatcgactcctttaattgaccactagctattgtaagtgaaaacttacaatttgtcattagtttacatataaaattaatgtatgatatagactttgatgttaaaatgttgccttaaatgatatgatgaaaaaatgaataataggcgatatataagaaatgaatcgtatagttgtaaatatgatatcattgattgagcgaattaatttataataaagctataagatatacgtagaaaatagatatatcattctataaagacaatattaaataaatataacgttaaaaacaattaatatcgatgaaggtgaataaatggttacattattactagttgcagtaacaatgattgtcagtttgacgataacaccaattgttattgcaatatcgaaaagattaaatttagttgataaaccaaattttagaaaagtacacactaaacctatttcagttatgggtggtacagtgattctcttttcatttttaataggtatttggattggtcatcctattgaaacagaaatcaaaccacttattattggtgcgattattatgtacgtacttgggcttgtagatgatatctacgatttgaaaccgtatataaaattggctggtcaaattgccgctgccttagtagttgctttttatggtgtgactattgattttatttcgttgccaatgggtacaacgattcattttggatttcttagtattccaattactgtgatttggattgttgctattacaaatgcaattaacttaattgatggactcgatggtttggcgtcgggtgtttctgcaatcggactcattacaataggattcattgcaattttacaagctaatattttcataacgatgatttgttgtgttttattaggctctttaattgggtttttattttacaatttccatcctgccaaaatatttttaggtgatagtggggctttaatgattggatttatcatcggattcctttctttactcggattcaaaaatattacaattattgcattgttcttcccaattgttatcttagcagttccattcattgatactttgttcgcaatgattcgacgtgtgaaaaaagggcagcatataatgcaagctgataaatcgcatttgcatcataaactattagctttaggctacacacatagacaaacagtattattaatctattcaatctctattttatttagtctttcgagcattattttgtatgtatcgccaccattaggtgttgtattaatgtttgtattaatcatatttagtattgaattaattgttgaatttacaggattaatagataacaactaccgaccaatattaaatttaattagtcggaaatcgtcacacaaagaggaatagggaatgaaagcatagctgtatgggataatttgtattatatggctttactctttgcaattttttatgtattaaatttcaaatataaaaaagcactgccataaacgtgtacttcaattgtcgtttaataatacgcaattgatatttaccgtcttatgatagtgctttttatttttattcagttggtatatcgaaaggtaactgctttggagtttcttcagtcaaatcgaaatttcctgcagtcatttgatttaaaaagttaataaacgcttcatagtcacttttaacgacatcgatatagtagcttaccttatcagtgtaagtttggtttcttaacataaaatgagttgaagctaattcatattcaaatttaccagtttgatcataattcagtgttactatacatggtactgcttctcgtagttcgacacgtccgacatcataaatgacgtctctaacagcaccgctataggcgcgaattaaaccgccaccacctaatttaataccaccaaaatatcttgttactacgacacacgcattatgaacatcgagcttttttaatatgtctaacattgggacaccggcagttcctgtcggttcaccgtcatcattcgctttttgaatattcatttcaggtccaatagtatatgcagaacaattatgagtggcatctttatgttctttttttattgcagcaataaatgctttagcttcatcttcattttgaacaggtttgatatgagcaatgaatcttgatttactaatcacattttcaataatgtgttcttttttaacagtaatgatattttgtgtcataataactccttaattcataagcttaagattatttaatcttcattatacactgaaaatgacatgactataaatcgtttgattgccattttctttttaactgaaatattgtatcattgctatgagtatattttaggaggacgactatgaaaattgctgtgatgaccgattctacaagttatctgtcgcaggacttaatcgataaatataatattcaaatagcgccattaagtgtgacttttgatgatgggaagaactttacagaaagtaatgaaatagcaattgaagaattttataataaaatggcatcgtctcaaacgattccaacaacaagccaaccagcaattggcgaatggattactaaatatgaaatgctaagagatcagggttacacagatatcattgtcatttgcttatccagtgggattagtggaagttatcaatctagttatcaagcaggggaaatggttgaaggtgttaatgtacatgcatttgatagtaagcttgcagcaatgattgaaggatgttatgtattacgtgctattgaaatggttgaagaaggatacgaaccacagcaaattattgatgatttaactaatatgcgtgaacacacaggtgcatatttaattgttgatgacttaaagaatttacaaaaaagtggtcgaattactggtgctcaagcatgggttggaacattattgaaaatgaagccagttcttaagtttgaagatggcaagattataccagaagaaaaagttcgtactaaaaagcgtgccattcaaacattagaaaagaaagtattagatattgtaaaagactttgaagaagtaactttatttgtcataaatggagatcatttcgaagatggtcaagcgttatacaaaaagttacaagatgattgtccttcagcttatcaagtagcatactctgagtttggtccagttgttgcagcacatttaggttctggtggattaggtttaggctatgttggcagaaaaataagattaacataattataaaattttaataaaagagtctatattgtaattggaaattatctctcgtatacatggctttaaatgttcatcatttgaaagccaaaatgctaaagatataagaaaatcattataatattaggctcttttttacgttgaaatgaggttttaagcattaaacattacgggaaattaattcatcctcatacttcacttactaatgaaaaaattaaaaaagaagtaacaggtgtcatcaaacaaaattcaaactattattgtgttcaatgtgaaagtacaaatccaaagcatttttatcagtatgattcctcagtacattccaagaaaattgtatattgcagaaattgtatatcactgggtcgaatggataatgtaacaagatataaaataacagagagttcgcaaagttcatcacaagcatattatcatctctcatttgaattgtcggaacagcagtcttatgcctcagaacatattgttcgagccattagaaagagacaaacgattttgttatatgccgtaacaggtgcaggtaagacagaaatgatgtttcaaggcattcaatatgcaagaatacagggagataatatagctattgtgtcaccacgtgtagatgttgttgtagaaattagtaaacgtattaaagacgcatttcttaatgaagatatagacatactacaccagcaatcaagacaacaatttgaagggcattttgttgtatgcacagtgcatcaactttaccgattcaaacagcactttgatactatttttattgatgaagtcgatgcctttcctttatcaatggataaaaatctacaacaagcattgaagtcatcttctaaagttgaacatgcaacaatttatatgacagcaacaccaccgaaacaacttctgtcagagattccccacgaaaatataattaaattgccagctcgctttcataaaaaatcacttccagttcctaaatatcgttatttcaaacttaataataataagattcagaaaatgttataccgaattttacaagatcaaattaataatcaacgttatacactggtgttttttaacaatatagaaacaatgattaaaacattttcggtttataagcagaaaattactaaattaacatacgtccatagcgaggatgtttttcgctttgaaaaagttgaacaattaaggaatggacatttcgatgtcatttttactacgacaatattagaacgtggatttacaatggcaaatttggatgttgttgttatcgatgcacatcaatatactcaagaggctttaatacaaattgctggacgtgttggacgaaaattagaatgtcctactggaaaagtattgttttttcatgaaggagtaagtatgaatatgattcaagctaaaaaagagattcaaaggatgaacaaattagcattaaaaagaggttggattgatgaataattgtttgagttgtggtgctaagttatatgaaaatataaccatttataatttgttcaagaaacctaatagattatgtgacagatgcaaagagaattgggacaatattaaacttgatattaaagcaaggcgatgttcaaggtgcttaaaacacttaaatcaagatgaagcgtattgtttagactgcaagtttctatcggcacactttaatttaatggaacaattatattgtcaatttcaatatgacggtttaatgaaagagatgatacatcagtataaatttttgaaagactattatttatgtgaattattggcacatttgattgaaataccacaaacatcttatgactatattgtgccaattccttcttcgccggcacatgatttatctagaacatttaacccggtagaagcagtactaaaagctaaagggattcgctttgataagattttaaagatgtcaaatagaccaaaacagtctcatttaactaagaaagagcgtctggcagatgaaaatccatttattattgatacggaattagatttaaatggcaaggaaatattactcgttgacgatatttatacaactggattaacaattcatcgtgcagggtgtaaattatatgctaaaaatatcagaaaattcaaagtgtttgcgtttgcacgatagcgtaaaaatgttaaaatataataaagagttaccaataaagaggtttaaggagagattactatgattagatttgaaattcatggagataacctcactatcacagatgctattcgcaactatattgaggaaaaaattggtaagttggaacgttattttaatgacgtaccaaatgcagtggcgcatgttaaagttaaaacttattcaaattcagctactaaaattgaagtaacaattccattgaaaaatgttacgttaagagctgaagagcgaaacgatgatttatacgcaggtattgatttaattaataataaacttgaaagacaagttcgaaaatataaaacacgtattaatcgtaagagccgtgatcgaggagatcaagaagtgtttgttgccgaattacaagaaatgcaagaaacacaagttgataatgacgcttacgatgataacgagatagaaattattcgttcaaaagaattcagcttaaaaccaatggattcagaagaagcggtattacaaatgaatctattaggtcatgacttctttgtattcacagacagagaaactgatggaacaagtatcgtttaccgccgtaaagacggtaaatatggcttgattcaaactagtgaacaataaattaagtttaaagcacttgtgtttttgcacaagtgcttttttatactccaaaagcaaattatgactatttcatagttcgataatgtaatttgttgaatgaaacatagtgactatgctaatgttaatggatgtatatatttgaatgttaagttaataatagtatgtcagtcttttgtatagtccgagtcgaaaatcgtaaaatatttataatataatttattaggaagtataattgcgtattgagaatatatttattagtgataaacttgttgacaacagaatgtgaatgaagtatgtcataaatatatttatattgattctacaaatgagtaaataagtataattttctaactataaatgataagatatattgttgtaggccaaacagttttttagctaaaggagcgaacgaaatgggatttttatcaaaaattcttgatggcaataataaagaaattaaacagttaggtaaacttgctgataaagtaatcgctttagaagaaaaaacggcaattttaactgatgaagaaattcgtaataaaacgaaacaattccaaacagaattagctgacattgataatgtcaaaaagcaaaatgattatttagataaaattttaccagaagcatatgcacttgttagagaaggctctaaacgtgtattcaatatgacaccatataaagttcaaattatgggtggtattgcaattcataaaggtgatatcgctgagatgagaacaggtgaaggtaaaacattaacagcgacaatgccaacatacttaaatgcattagctggtagaggtgttcacgttattacagtcaatgaatacttatcaagtgttcaaagtgaagaaatggctgagttatataacttcttaggtttgactgtcggattaaacttaaacagtaagacgacagaagaaaaacgtgaagcatacgcacaagacattacttacagtactaataatgagctaggttttgattacttacgagataacatggtgaattattctgaagatagagtaatgcgtccattacattttgcaatcattgatgaggttgactcaattttaatcgacgaggcacgtacgccattaattatttctggtgaagctgaaaagtcaacgtcactttatacacaagcaaatgtttttgcgaaaatgttaaaacaggacgaagattataaatacgatgaaaaaacgaaagctgtacatttaacagaacaaggtgcggataaagctgaacgtatgttcaaagttgaaaacttatatgatgtacaaaatgttgatgttattagtcatatcaacacagctttacgtgcgcacgttacattacaacgtgacgtagactatatggttgttgatggcgaagtattaattgtcgatcaatttacaggacgtacaatgccaggccgtcgtttctcggaaggtttacaccaagctattgaagcgaaggaaggcgttcaaattcaaaatgaatctaaaactatggcgtctattacattccaaaactatttcagaatgtacaataaacttgcaggtatgacaggtacagctaaaactgaagaagaagaatttagaaatatttataacatgacagtaactcaaattccgacaaataaacctgtgcaacgtaacgataagtctgatttaatttacattagccaaaaaggtaaatttgatgcagtagtagaagatgttgttgaaaaacacaaggcagggcaaccagtgctattaggtactgttgcagttgagacttctgaatatatttcaaatttacttaaaaaacgtggtatccgtcatgatgtgttaaatgcgaaaaatcatgaacgtgaagctgaaattgttgcaggcgctggacaaaaaggtgccgttactattgccactaacatggctggtcgtggtacagatatcaaattaggtgaaggcgtagaggaattagggggtttagcagtaataggtacagaacgacatgaatctcgtcgtattgatgaccagttacgtggtcgttctggacgtcaaggtgataaaggggatagtcgcttctatttatcattacaagatgaattaatgattcgttttggttctgaacgtttacagaaaatgatgagccgactaggtttagatgactctacaccaattgaatcaaaaatggtatcaagagctgtagaatcagcacaaaaacgtgtagaaggtaataacttcgacgcgcgtaaacgtatcttagaatacgatgaagtattacgtaaacaacgtgaaattatctataacgaaagaaatagtattattgatgaagaagacagctctcaagttgtagatgcaatgctacgttcaacgttacaacgtagtatcaattactatattaatacagcagatgacgagcctgaatatcaaccattcatcgactacattaatgacatcttcttacaagaaggtgacattacagaggatgatatcaaaggtaaagatgctgaagatattttcgaagtcgtttgggctaagattgaagcagcatatcaaagtcaaaaagatatcttagaagaacaaatgaatgagtttgagcgtatgattttacttcgttctattgatagccattggactgatcatatcgacacaatggatcaattacgtcaaggtattcacttacgttcttatgcacagcaaaatccattacgtgactatcaaaatgaaggtcatgaattatttgatatcatgatgcaaaatattgaagaagatacttgtaaattcattttaaaatctgtagtacaagttgaagataatattgaacgtgaaaaaacaacagagtttggtgaagcgaagcacgtttcagctgaagatggtaaagaaaaagtgaaaccgaaaccaatcgttaaaggcgatcaagttggtcgtaacgatgattgtccatgtggtagtggtaaaaaattcaaaaattgccatggaaaataaatgatataaaataactccttccaattaaacacctatagtttgtgttatgggaggagtctttttattttacaagcgttaaatactttaaaaaatgtgaagaagttgttaaacgttgttatgtacttagttttaaaaaatcggtttaggcatatgtcgatgataaatgtactgatttttaacaataaatgcataaactaattgtcagtgtgcttatatttcttaacattgttatttaacaaaattatgttaaaatttagcattataaaagatacaaatcaatgacttgaattgaaatataaataggagcgaatgctatggaattatcagaaatcaaacgaaatatagataagtataatcaagatttaacacaaattagggggtctctttgacttagagaacaaagaaactaatattcaagaatatgaagaaatgatggcagaacctaatttttgggataaccaaacgaaagcgcaagatattatagataaaaataatgcgttaaaagcaatagttaatggttataaaacactacaagcagaagtagatgacatggatgctacttgggatttattacaagaagaatttgatgaagaaatgaaagaagacttagagcaagaggtcattaattttaaggctaaagtggatgaatacgaattgcaattattattagatgggcctcacgatgccaataacgcaattctagagttacatcctggtgcaggtggcacggagtctcaagattgggctaatatgctatttagaatgtatcaacgttattgtgagaagaaaggctttaaagttgaaactgttgattatctacctggggatgaagcagggattaaaagtgtaacattgctcatcaaagggcataatgcttatggttatttaaaagctgaaaaaggtgtacaccgactagtacgaatttctccatttgattcatcaggacgtcgtcatacatcatttgcatcatgcgacgttattccagattttaataatgatgaaatagagattgaaatcaatccggatgatattacagttgatacattcagagcttctggtgcaggtggtcagcatattaacaaaactgaatcggcaatacgaattacccaccacccctcaggtatagttgttaataaccaaaatgaacgttctcaaattaaaaaccgtgaagcagctatgaaaatgttaaagtctaaattatatcaattaaaattggaagagcaggcacgtgaaatggctgaaattcgtggcgaacaaaaagaaatcggctggggaagccaaattagatcatatgttttccatccatactcaatggtgaaagatcatcgtacgaacgaagaaacaggtaaggttgatgcagtgatggatggagacattggaccatttatcgaatcatatttaagacagacaatgtcgcacgattaatatatattttaaaaccgaggctctaaaagggcgtcggtttttggtttttttaaaggtagctaaataaattgtaaattagattttggaatatgatttgtttatgaatatttaagtacaattcggtagatagagttagaatatattttttgaaagttgtatttgttaaaacaacatatgcagtgtgcatttagtaatattacctatggcgattttcaaggtattgaattaatcgttgaaaacgttctcaattacatggtatgaatacattttacactatgataaaaggttgtattctttttatattgttaaccatttgattacatcgttataacaatagcttttgacaaaatgtattgtgctatagtatttgcatacttaaaatactaacagcaaaggaatgacagcaagatgaaaaaaactcttacagtgacggtttcgtcagtgttagcttttttagctttaaataatgcagcacatgcacaacaacatggcacacaagtaaaaacacctgttcaacataattatgtatcaaatgttcaagcacaaacgcaatcaccgacaacttatacagtagttgctggcgattcattatataagattgcattagagcatcacttaacgttgaatcaattatattcatacaatcctggtgtaacacctttaatttttcctggtgacgtgatttcacttgtgcctcaaaataaagtgaaacaaactaaagcggttaaaacaccagtaagaaaagcaagccaagctaaaaaggtagtaaaacaacctgtacaacaagcgtctaaaaaagtagtagttaagcaagcacctaagcaagcagtagctaagacagttaatgtagcatacaaacctgctcaagtacaaaaatcagtaccaactgtacctgttgcacataactacaataaatcagttgctaacagagggaacttatatgcttatggaaactgcacatattatgctttcgatcgtcgtgcacaattaggtagaagtataggaagtttatggggcaatgcaaataactggaattacgcagcaaaagttgcaggatttaaagtagataaaacaccagaagttggcgctattttccaaacagctgctggcccatatggacatgttggtgttgttgaatctgtaaaccctaatggaacaattactgtttctgaaatgaactatgctggatttaatgttaaatcttcaagaacaattttaaatccaggaaaatataattacatccactaagtaatatatcaagacaagactatcctcttagcctgtttaagtaacaggttgagaggattttttggtatcatttaatcagagttatataaagaagatatttaaatgatatttaattgattgatatgtaaaaagaaagtataatttatgattaattaatggaggaggtaattgaaatgggtgtacatcaatattttaaaagattatcagatatggaaagacttataagattacctggaaaatttaaatattttgaacacaatgttgcagcacactcctttaaagtaactaaaattgctcaatatctagcaacagttgaagaatatcatggacgaaagattaattggaaaagcttatatgaaaaagcattaaatcatgatttcgccgaagtgtttactggtgatataaaaacacctgttaaatatgcgagtagtgaattaaaaaaattattttcgcaagttgaagaagaaatggtagagacctttattgaagaagaaattccattacaatatagagatgtttataagcaacgactgcaagaaggtaaagatgattcattagaaggccaaatactttcagttgctgataaaattgatttgctttatgaaacatttggagaaatacaaaaacgtaatcccgaagaattatttttcgaaatttatgaaatgagtctagaaacaattattcaatttgaccatttagcatctgtacaagattttattaataatatcattccagaaatgttgactgaaaactttatacctagaacagaattaagagaaacaaccatgaacattttaaataaaagaaaagaggaaaatgaatgatatggtattttagcgcagcattctttccatgtgtcttggtagtattatttagtgtaataacaagaagtaagtgggtcggtactattctgacattaattttaattggtgcctcaatctataaagagtatttccataacgagtggattatttttattgatgtagtgtcattattagctggttatttaattatagatcaactcgaatttcataaacatcaagatgaagatcgctaagattaactttaaaataatgtttcaaacaaatttgttgaaacaaaatgatgattaatataatgtgtatttacatactaaaaataacaagataaacgatttgatttaaggcaagcatagttagcacaactatgtttgtttttctttgttcgacatttttacgaacaaacgtttgctttttgtgtgactactttgctaaaatatgtaatgagaaagcaaagagttgagcggaaatataaataatacgttgaaagaggaggcatatgtgacaatggttgaacattatccttttaaaatacattctgattttgagcctcaaggtgaccaaccgcaagcaattgaagaaatcgtggaaggtattaaagcggggaaaagacatcaaactttattaggtgctactggcacagggaaaacatttacgatgagtaatgttattaaagaagttgggaaaccaacgttaattatcgcgcataacaaaacattagcaggacaattatatagtgagtttaaagaattttttcctgaaaacagggtggaatactttgtaagttactatgattattatcaaccagaggcatacgtaccgtctactgacacttttattgaaaaagatgcctcaatcaatgatgaaattgatcaactacgacattctgctacaagtgcattatttgaacgcgatgatgtaattattattgctagtgtaagttgtatatatggtttaggtaatcctgaagaatataaagatttagtagtaagtgttcgagttggtatggaaatggatagaagtgaattacttagaaaacttgtagatgtgcaatatacacgaaatgacatcgatttccaacgaggaacgtttcgagtgcgtggtgatgtagttgaaatattcccagcctctaaagaagaactttgtataagggttgagtttttcggcgatgagattgaccgtatccgagaagttaactacctaacaggtgaagtgttgaaagaaagagaacattttgcgatattcccagcttctcacttcgtaacacgtgaagaaaagttgaaagttgcgattgaacgtattgaaaaagaattggaagaacgattgaaagaattacgagatgagaataaattactagaagcgcaaaggttagaacagcgtaccaactatgatttagaaatgatgcgagagatgggattctgttcaggaattgaaaactattccgtacatttaactttgcggccactgggttcgacaccatatactttattggattactttggcgatgattggttagtaatgattgatgaatcacatgtgacattaccgcaagttcgaggcatgtataacggagacagagcgcgtaaacaagttttggtggatcatggatttagattaccgagtgcattagataaccgtccacttaaatttgaagaatttgaagaaaagacaaaacaacttgtgtatgtatctgcaacgcctggaccatacgaaattgaacatacggataagatggttgaacaaattattcgtcctactggtttactggatcctaagattgaggttagacctactgaaaatcaaattgacgatttattaagtgaaattcaaacaagagttgagcgtaatgaacgcgtacttgttacaacgctcactaaaaagatgagtgaagatttaaccacatacatgaaagaagcgggtattaaagttaattatctgcattcagaaatcaagacattagaacgaattgaaataattagagacttacgaatgggtacatatgatgttatcgtaggtattaatttattaagagagggtattgatataccagaagtttctctagttgtcatattagatgcagataaagaagggtttttacgttctaaccgctcattaattcaaacaataggtagagctgcgcgtaacgataaaggtgaagtcattatgtatgccgataaaatgactgattcgatgaagtatgcaattgatgagacacaacgtcgtcgagaaatacagatgaaacataatgaaaaacatggtattacacctaaaacaattaataaaaaaatacatgatttaattagtgctactgttgaaaatgacgaaaataatgacaaagcacaaactgtgatacctaagaagatgacgaaaaaagaacgtcaaaagacaatcgacaatatagaaaaagaaatgaaacaagcagcgaaagatttagatttcgagaaagctacagaattaagagatatgttatttgaattaaaagcagaagggtgacaagtaaatgaaagaaccatccatagtagtaaaaggtgctcgtgcgcataacttgaaagatattgatatcgaactacctaaaaataaattaattgttatgacaggtttatctgggtcaggtaaatcgtcattagcattcgatactatatatgctgaaggacaacgacgttatgttgaatcattaagtgcctatgcgcgtcaatttttaggccaaatggacaaaccagatgttgatacaattgaaggattatcgccagcaatttcaatagatcaaaaaacaacaagtaaaaatccaagatcaactgtagcaacagtaacagaaatatatgattatatacgtttgttatatgcacgtgttggtaaaccttactgtccaaatcacaatatagaaattgaatcgcaaacagtacaacaaatggttgaccgcattatggaattagaggcacgtacaaagattcaattattagcacctgtcatcgctcatcgtaaaggtagtcatgaaaagctaatcgaagatattggtaaaaaaggttatgtacgtttaagaatcgatggcgaaattgttgatgtaaatgatgtacctactttagataagaacaagaatcatacaatagaagttgttgtagaccgattagttgttaaagatggaattgaaacacgactagctgactctatagaaactgccttagagctttcagaaggacaattaacagtcgatgtcattgacggggaagaccttaagttttcagaaagccatgcttgtcctatatgtggattttcaatcggagagttagaaccaagaatgtttagctttaacagtccttttggtgcttgtccgacatgtgatggcttaggccaaaagttaacagtcgatgtagacttggttgttcccgacaaagataagacgctaaacgaaggtgcaatagaaccttggataccgacgagttctgatttttatccaacattgttaaaacgtgtttgtgaagtttataaaatcaatatggataaaccttttaaaaagttaacagaacgtcaacgtgatattttattgtatggttctggtgacaaagaaattgaatttacatttacacaacgtcaaggtggtactagaaaacgaacaatggttttcgagggtgtagttcctaatataagtagacgattccatgaatctccttcagaatatacacgtgaaatgatgagtaaatatatgactgaactaccttgcgaaacttgtcatggaaagcgattgagtcgtgaagcgttatctgtttatgtaggtggtttaaatattggtgaagtagtcgaatattcaatcagtcaagcgctgaactattataaaaacattgatttgtcagaacaagatcaagcgattgcaaatcaaatattgaaagaaattatttcccgactcacttttttaaataatgtgggacttgaatatttaacgttaaacagagcttcaggtacactttcaggtggtgaagcacaacgtattcgattagcaacgcaaattgggtcgcgtttgactggtgtcttatatgtattagatgagccatcaattggactgcatcaaagagataatgatcgattaattaatacacttaaagaaatgagagatttaggaaatactttaattgtagttgaacacgatgatgatacaatgcgtgcggctgattacttagtggatataggtcctggtgctggtgaacatggagggcagattgtgtctagtggtactcctcaaaaggtaatgaaagataaaaaatcattaacaggacaatacttgagtggtaagaaacgtattgaagtacctgaatatcgcagaccggcttcagatcgtaaaatttctatacgtggagctagaagcaacaatcttaaaggggttgatgtggacataccactatcaatcatgacggttgttacaggtgtatcaggttctggtaaaagctcattagtaaatgaagtattatacaaatcattagctcaaaaaattaataaatctaaagtaaagccaggattgtacgataagattgaaggtattgatcaacttgataaaattattgatattgatcaatcaccaataggtagaacgccacgctctaatccagcaacatatactggtgtgtttgatgatatacgtgatgtgtttgcgcaaacaaatgaagctaaaattcgaggatatcaaaaagggcgttttagttttaatgtaaaaggtggacgctgtgaagcttgtaaaggtgacggtattattaaaattgaaatgcattttttacctgatgtttatgttccttgtgaagtgtgtgatggtaaacgatataatcgtgagacactagaggttacttacaaaggtaaaaatattgctgacattttagaaatgactgttgaagaagcaacacaattttttgaaaatattcctaagattaagcgcaagttacaaacactagttgatgttggtcttggatacgtcacattaggtcaacaagctacaacgttatcaggtggtgaggctcaacgtgtgaaacttgcatctgaacttcataaacgttcaactggtaaatctatttatatcctagatgaaccgacaacagggttacatgttgacgatattagtagattattaaaagtattaaaccgattagttgaaaatggtgatactgttgtaattattgaacataacctagatgttatcaaaacagcagactatattatagacttaggtcctgaaggtggtagtggcggtggtactattgttgcgactggcacacccgaagatattgctcagacaaagtcatcatatacaggaaagtatttaaaagaagtacttgaacgagataaacaaaatactgaagataaataagattaaaagaagtgaaggatgttataaatttatccttcgcttctttttattaatttagtaatgaatagtagaaagaaaagatgcgtaaaaagaattatgttaagataggttcaatctagagtagttaaacataaatcgaactgggagtgggacagaaatgataaagaatcactaatgatttattatgtagtggttctttgtcattagccacagctattgtgtacttaaaaataggaatgcatgagtgcaactcatgcataagaaatactaatttctaaagaaaaagtatttctttatgttggggccccgccaacttgcattgtttgtagaatttcttttcgaaattctttatgttggggccccgccaactaattccaatatatcattgtagagcttaggtcattgatttttggctcggacttttatggcgatatgaaccatgtaaattaagcaagcaataaattaatgattgatattgacttgtaaaataataacaataatgaacaattaatatttattttagcttttcaatgtagattggtgttatatttttgatatgataagaagagatgtaagagtagggataaatacaattgaggtgaacccatgttaacgacagaaaaactagttgaaacattaaagttagatttaatcgctggtgaagaaggactatcgaagccaattaaaaatgctgatatatcaagaccgggcttagagatggcaggttatttttcacattatgcgtcagatagaatacaactattaggaacaacggaactatcgttttacaatttattaccagataaggatcgcgcaggtcgtatgcgtaaactatgcagaccagaaacgcctgcaattattgtgacgcgtggattgcagccaccagaagaattagttgaagctgcaaaagaattaaataccccacttatagttgctaaagatgcgactacaagtttaatgagtcgcttaacaacgtttttagagcatgcacttgcaaagacgacatctttacatggtgttttagtagatgtttacggtgttggtgtactaattaccggtgattcaggaataggtaaaagtgagactgcgttggaattagttaaacgtgggcatagattagtagcagatgataatgtagaaatacgtcaaattaataaagatgaactaatagggaaaccaccaaagttaatagaacatctattagaaatacgtggactaggtattatcaatgttatgactttatttggcgcgggttcaatattaactgaaaaacgaattagattaaatattaatttggaaaactggaacaagcaaaagttatatgaccgcgtaggtcttaatgaagagacgctaagtattttagatactgaaatcactaaaaaaacaatacctgtaagacctggtagaaatgttgcggtaattattgaggtcgctgcaatgaactatcgattaaatatcatgggcattaacactgccgaagaatttagtgaaagattaaatgaagaaattatcaagaacagtcataagagtgaggagtaggttgaatgggtattgtatttaactatatagatcctgtggcatttaacttaggaccactgagtgtacgatggtatggaattatcattgctgtcggaatattacttggttactttgttgcacaacgtgcactagttaaagcaggattacataaagatactttagtagatattattttttatagtgcactatttggatttatcgcggcacgaatctattttgtgattttccaatggccatattacgtggaaaatccaagtgaaattattaaaatatggcatggtggaatagcaatacatggtggtttaataggtggctttattgctggtgttattgtatgtaaagtgaaaaatttaaacccatttcaaattggtgatatcgttgcgccaagtataattttagcgcaaggaattggacgctggggtaactttatgaatcacgaggcacatggtggacctgtgtcacgcgcttttttagaaaaattacatttgccaaattttataatagaaaatatgtatattaacggccaatattatcatccaacattcttatatgaatccatttgggatgtcgctggatttattatcttagttaatattcgtaaacatttaaaattaggagaaacattctttttatatttaacttggtattcaattggtcgattctttatagaaggattacgtacagatagcttaatgctcacaagtaatattagagttgcacaattagtatcaattcttttaattttaataagtataagtttaattgtatatagaaggattaagtataatccaccgttgtatagcaaagttggggcgcttccatggccaacaaaaaaagtgaagtagtgatattttgagaaaatttttatcaaaaacacatcatcatacaaaccctttatggcgtgtataccgtcttgttaaattttcgaaagtttttaagaatgtaattatcattgaattttcgaaatttattccaagtatggtactgaaaagacatatatataaacaacttttaaatattaatatcggtaatcaatcgtcgatagcttataaagtaatgttagatattttttacccagaactgattacgattggtagtaacagtgttattggttacaatgtaacaattttgacgcatgaagcattagttgatgaatttcgttatggaccagtgacgataggatctaacactttgattggtgcaaatgctaccattttacccggtataacgattggtgacaatgtaaaagttgcagctggtacggttgtttcaaaagatataccggataatggatttgcatatggcaaccctatgtatataaaaatgattaggaggtgacaattttatggcgcaaaagaataataatgtaattccaatgacttttgatgatgcattttatcgtaaaatggctaaacagaagtttaaacaaagagaatataaacgagctgctgaatactttgaaaaagtgttagaattgtcacctgatgatctggaaattcaaattgattatgcacaatgtctagtgcaacttggtattgctaaaaaagcagaacatttattttatgacaatattatttataataggcatctagaagatagcttttatgaattgagtcagctcaacattgaagttaacgaaccaaacaaggcattcttgtttggtattaattatgttattgttagcgacgaccaagattatagagatgaattagatcaaatgtttgatgtgaaatatcaaagcgaagaacaaattgaacttgaagctcaattgtttgtagttcaaatactattccaatatcttttttctcaaggtcgattaaaagatgcaaagaattatgtcttacatcaaccacaagaagttcaagatcatcgtgtcgtacgtaatttattggcaatgtgttatttatatctcggtgaatatgatacggctaaagcattgtacgaagcactattacaagaggatagtacagatatatatgcattatgccattatactttgctactttataacactaaggaaaatgaacaatatcaaaaatatttaaaaatattaaacaaagttgtacctatgaatgacgatgaaagttttaaattaggtattgtattaagttatttaaagcagtatcgtgcatcacaacaattgttgtaccctttatataaaaaagggaaatttttatcaattcaaatgtacaatgctttagcatataattattattatttaggtgaagaagacgaaagtcattactactgggataaattgaagcaaatttctaaagtggaaattggacatgcgccttgggtaattgaaaatagcaaagaagtttttgaccaacatattttgccattacttcaaagtgatgacagtcattatcgtttatatggtatttttttattggatcaattaaatggtaaagaaattgtgatgacggaaagtatttggcaggttctggaaaatctaaataattatgagaaattgtatttaacgtatttagttcaaggtttaacgctcaataaattagacttcattcatcgcggcttgttaacgctttaccaaaatgaattatttgtaagtgaaaatgatttaatggttgcatggattaatcaaggtgaactcataattgctgaaaaagtagatttaactgatgttgagccatatatcggtgcgtttatttatttgtattttaaaaatcaacctcgaaacgttacaaagaagcaaattacaacatggttaggcataacacaatataaactgaacaaaatgattgaatttctcttgagcatatagatttatgaaaagttagatttattatataatgcgcataatgattaataatgaggaggcgttaataaaatgactgaaatagattttgatatagcaattatcggtgcaggtccagctggtatgactgctgcagtatacgcatcacgtgctaatttaaaaacagttatgattgaaagaggtattccaggcggtcaaatggctaatacagaagaagtagagaacttccctggtttcgaaatgattacaggtccagatttatctacaaaaatgtttgaacacgctaaaaagtttggtgcagtttatcaatatggagatattaaatctgtagaagataaaggcgaatataaagtgattaactttggtaataaagaattaacagcgaaagcggtcattattgctacaggtgcagaatacaagaaaattggtgttccgggtgaacaagaacttggtggacgcggtgtaagttattgtgcagtatgtgatggtgcattctttaaaaataaacgcctattcgttatcggtggtggtgactcagcagtagaagagggaacattcttaactaaatttgctgacaaagtaacaatcgttcaccgtcgtgatgagttacgtgcacaacgtattttacaagatagagcattcaaaaatgataaaatcgactttatttggagtcatactttgaaatcaattaatgaaaaagacggcaaagtgggttctgtgacattaacgtctacaaaagatggttcagaagaaacacacgaggctgatggtgtattcatctatattggtatgaaaccattaacagcgccatttaaagacttaggtattacaaatgatgttggttatattgtgacaaaagatgatatgacaacatcagtaccaggtatttttgcagcaggagatgttcgtgacaaaggtttacgccaaattgtcactgctactggcgatggtagtattgcagcgcaaagtgcagcggaatatattgaacatttaaacgatcaagcttaattcgaggtcgaattaagatgttgagttgtaagttatttggatatttattttaatagtgtcatcacattgttaaaataatgtcttacttttaaattaaaacaaattatatagaaaactagaacttagtacgtatcatttgtgcgtttcaatgagttctagtttttttatatgttatattaaacttataactttatgggagtgagacagaaatgataaagagccactaatgatttattatgtagtggttcttacacattagccacagctaatgtgtacttaaaaataggaatacatgagtaaaactcatgcataagaaatactaatttctatagaaaaagtatttctttatcgttgtcccaccccaactcgcacattatcgtaagctgacttttcgtaagcttctgtgttggggccccgccaacttgcattgtctgtagaaattcttttcgaaattctctgtgttggggcccacaccccaactcgcattgcctgtagaatttcttttcgaaattctctgtgttggggcccctgactagagttgaaaaaagcttgttgcaagcgcgttttcattcagtcaactactagcaatataatattatagaccctaggacattgatttatgtcccaagctccttttaaatgatgtatatttttagaaatttaatctagacatagttggaaataaaaataaaacatcgttgcttaattttgtcatagaacatttaaattaacatcatgaaattcgttttggcggtgaaaaaataatggataataatgaaaaagaaaaaagtaaaagtgaactattagttgtaacaggtttatctggcgcaggtaaatctttggttattcaatgtttagaagacatgggatatttttgtgtagataatctaccaccagtgttattacctaaatttgtagagttgatggaacaaggaaatccatccttaagaaaagtggcaattgcaattgatttaagaggtaaggaactatttaattcattagttgcagtagtggataaagttaaaagtgaaagtgacgtcatcattgatgttatgtttttagaagcaagtactgaaaaattaatttcaagatataaggaaacgcgtcgtgcacatcctttgatggaacaaggtaaaagatccttaattaatgcaattaatgatgagcgagagcatttgtctcaaattagaagtatagctaattttgttatagatactacaaagttatcacctaaagaattaaaagaacgcattcgtcgatactatgaagatgaagagtttgaaacttttacaattaatgtcacaagtttcggttttaaacatgggattcagatggatgcagatttagtatttgatgtacgatttttaccaaatccatattatgtagtagatttaagacctttaacaggattagataaagacgtttataattatgttatgaaatggaaagagacggagattttctttgaaaaattaactgatttgttagattttatgatacccgggtataaaaaagaagggaaatctcaattagtaattgccatcggttgtacgggtggacaacatcgatctgtagcattagcagaacgactaggtaattatctaaatgaagtatttgaatataatgtttatgtgcatcatagggacgcacatattgaaagtggcgagaaaaaatgagacaaataaaagttgtacttatcggtggtggcactggcttatcagttatggctaggggattaagagaattcccaattgatattacggcgattgtaacagttgctgataatggtgggagtacagggaaaatcagagatgaaatggatataccagcaccaggagacatcagaaatgtgattgcagctttaagtgattctgagtcagttttaagccaactttttcagtatcgctttgaagaaaatcaaattagcggtcactcattaggtaatttattaatcgcaggtatgactaatattacgaatgatttcggacatgccattaaagcattaagtaaaattttaaatattaaaggtagagtcattccatctacaaatacaagtgtgcaattaaatgctgttatggaagatggagaaattgtttttggagaaacaaatattcctaaaaaacataaaaaaattgatcgtgtgtttttagaacctaacgatgtgcaaccaatggaagaagcaatcgatgctttaagggaagcagatttaatcgttcttggaccagggtcattatatacgagcgttatttctaacttatgtgtcaatggtatttcagatgcgttaattcattctgatgcgcctaagctatatgtttctaatgtgatgacgcaacctggggaaacagatggttatagcgtgaaagatcatatcgatgcgattcatagacaagctggacaaccgtttattgattatgtcatttgtagtacacaaactttcaatgctcaagttttgaaaaaatatgaagaaaaacattctaaaccagttgaagttaataaggctgaacttgaaaaagaaagcataaatgtaaaaacatcttcaaatttagttgaaatttctgaaaatcatttagtaagacataatactaaagtgttatcgacaatgatttatgacatagctttagaattaattagtactattcctttcgtaccaagtgataaacgtaaataatatagaacgtaatcatattatgatatgataatagagctgtgtaaaaaaatgaaaatagacagtggttctaaggtgaatcatgttttaaataagaaaggaatgactgtacgatgagctttgcatcagaaatgaaaaatgaattaactagaatagacgtcgatgaaatgaatgcaaaagcagagctcagtgcactgattcgaatgaatggtgcacttagtctttcaaatcaacaatttgttataaatgttcaaacggaaaatgcaacaacggcaagacgtatttattcgttgattaaacgtgtctttaatgtggaagttgaaatattagtccgtaaaaaaatgaagcttaaaaaaaataatatttatatttgtcgtacaaagatgaaagcgaaagaaattcttgatgaattaggaattttaaaagacggcatttttacgcatgaaattgatcattcaatgattcaagatgatgaaatgagacgcagttacttgagaggagcttttctggcaggtggctcagtgaataaccctgaaacatcttcgtaccatttggaaattttttctcaaaatgagagtcatgcagaaggcttaacgaaactaatgaatagttatgaattgaatgccaaacatttagagcgaaaaaaaggaagtattacgtatttaaaagaagcggaaaagatttcggattttcttagtttgataggtggctatcaagcgttattaaaatttgaagacgtacgtattgtaagagatatgcgtaattctgttaaccgactcgttaattgtgaaacggcaaatctaaataaaacagttagtgctgcgatgaaacaagttgagagcattaaattgattgataaagaaattggtattgaaaatttaccagacaggttgagagagattgctagaattcgagtagaacatcaagaaatttcgttgaaagagcttggagaaatggtatcaactggtccaatttcaaaatcaggtgtaaatcaccgattaagaaaacttaatgatttagccgataagattagaaatggtgaacaaatagaattataagtaagaaggtgtttttggtagtgaattatcaaaaacacttttttatgtttaaaaagtgtttaatgaataatagtcgactaactattaaattgagctggaaagtttaatgaaggaaattcaataaccaagtgatgcctaattttctcattaaatagcatcatatgtatcaatttggtcataagaaaatatgaatgtgataattaattgagtccctgaaagtccctgatcatagacaaaaacaaaatcagcataaataagaatcccgacattgcgggattctctgtattgaaaagtattgtattttattaaaacagcctccttgaagggaattgaacccctatcttaagaaccggaatcttacgtgttatccattacaccacaaggagcaaatatgtaatcatatctctgtactatgagaagtaaaataagtacaatctaaaatagatattatcagtttacaaaggaaagagaaaagcgtcaaacaatgtaactatttaaagtcaaagtgtttgaccaagtttgacttaatatgtaaaataatgagtaacagttattacaaggaggaaatatagatgaatttaattcctacagttattgaaacaacaaaccgcggtgaacgtgcatatgatatatactcacgtttattaaaagaccgtattattatgttaggttcacaaattgatgacaacgtagcaaattcaatcgtatcacagttattattcttacaagcgcaagactcagagaaagatatttatttatacattaattcaccaggtggaagtgtaacagctggttttgcgatttatgatacaattcaacacattaaacctgatgttcaaacaatttgtatcggtatggctgcatcaatgggatcattcttattagcagctggtgcaaaaggtaaacgtttcgcgttaccaaatgcagaagtaatgattcaccaaccattaggtggtgctcaaggacaagcaactgaaatcgaaattgctgcaaatcacattttaaaaacacgtgaaaaattaaaccgcattttatcagagcgtactggtcaaagtattgaaaaaatacaaaaagacacagatcgtgataacttcttaactgcagaagaagctaaagaatatggcttaattgatgaagtgatggtacctgaaacaaaataattcaaagtaaagagtagactaagcagtctgctctttttgtatgagtaaaccgaggtgtcaataaattgtttactatactttgagcggaaatatgattgaatgaagctagttgaaccgtaactatatgaaatgttcccttcaaagtagacattgaaaggaacatttcaatcctttgtttgtaagtcgctctagacattacatttagtacatatgttgtttctaatgctcattaatggtattgattattctttaattaaatcttcaagtgccatttttaaattactatatttaaattggaatcccaatgcttgaattttattaggtaatactttttgagtatccaatactactgttgacatttgaccaagtatgagacgcattgcaagacttggtgcccaagtttcatggggcttatgcatagctcttgctaaagtgtagccaaataaattttgacgctcaggtataggtgcagttaaattaaacggaccactagctgactcgttatttattaaaaataaaatagcttgaattaaatcattgatatgaatccatgaataccattgttgaccagaacctaatctaccaccaatgtaatatttgtatggtagtttcattgtttgtaacgcaccgccttcattcgataaaatcataccgaaacgaccgatgacaactcgcgtacctaattgttcaaattgttgtgcgaaacgttcccattgatacacaatatctgataagaaatcaaatggtaaagttttataaacttctgtgtaactcataaataaatcaggaggatagtaaccagtggcgctagcattaaataaaactttaggtgctttattacgtgatttaaacaattcatataaagcttgcgtagattgaattctacttagcattagcgtttgtttatattccggtgtccatcgtttattcagtgtagcacctgctaagttgatgaccacatcgatattttgaggaactttgtgttcccacccagatttagcccagttgacatatgaaattttcttatcatttgaaatttggtcgtgtcgcgttaatatcgtgatatgtgaatctgattttttaatttcattaactaattgagatccaaccataccagtcccaccagtaattaagtattgtttcattatcattcaccccatgtaattttgtatttagttactatttaataatcattattgttgttcaaaggttatacattatttagacaataatatgtcaataactttttttgaattgtattttaataaaaatgatataagttataataaaggtgtaccttcgataacgaataaacatctcttaaaagtatgtgtaaaacgctgcatgatacaaacgaaggtaaaaatttgactccctttagtagtggacccgtacgttaatcgtgcgggtcgtttttatttatttcttattcccattatacatcaatttaaagcattaattttttaaacaaatttaagaatacatagtaatataacaatctaaacataaaaacttttaacacaacacttaaaccaatgctttaattttcaatacgtagctataatttgttgtaaaatcaaaaaggttaaaatgttaattttcaaaaaaaggctcaaaatatgtttgatttagttattaaatgttaagatatataagactactatttctttgtaaaaatgaatccgatttacgagtgagtaatagtgaaggcagttttaagttgaagaaggcaaaaagagtaaatgtttattaatatttgtagaaactaggtaagcaaattagttgtgaaaatgttaatggttgcgtgataatttctatatttaaattagtttgaagtgagggagagtatgtcgaatcaaaattacgactacaataaaaatgaagatggaagtaagaagaaaatgagtacaacagcgaaagtagttagcattgcgacggtattgctattactcggaggattagtatttgcaatttttgcatatgtagatcattcgaataaagctaaagaacgtatgttgaacgaacaaaagcaggaacaaaaagaaaagcgtcaaaaagaaaatgcagaaaaagagagaaagaaaaagcaacaagaggaaaaagagcagaatgagctagattcacaagcaaaccaatatcagcaattgccacagcagaatcaatatcaatatgtgccacctcagcaacaagcacctacaaagcaacgtcctgctaaagaagagaatgatgataaagcatcaaaggatgagtcgaaagataaggatgacaatgcatctcaagataaaccagatgataatcagaagaaaactgatgataataaacaaccagctcagcctaaaccacagccgcaacaaccaacaccaaagccaaataataatcaacaaaataatcaatcaaatcagcaagcaaaaccacaagcaccacaacaaaatagccaatcaacaacaaataaacaaaataatgctaatgataagtagtatttagtcaaacaaaaatgaaccagtatgacagacaacacaattaattaggttgtctcgaatattggttcttatttttataattgttaattaggggagagatgatacttaaatagttagttgtttattttacggaaagtgaaatttattttgagtgaggtgggacagaaatgatattttcgcaaaatttatttcgtcgtctgaccccaacttccacattattgtaagctgactttccgtcagcttctgtgttggggccccgccaacttgcacattattgtaagctgactttccgccagcttctgtgttggggcccctgactttaattgaaaaatgcttgttacaagtgcattttcgttcggtcactactactaatgtgacttttcggattctagagcattgatttatgtcttagttcaaataataagcaaatgattagcgagtcagtataagggtatacatttgactacagcgaataaaataaaacgttttgttgaataacaaatcgaaaatatattgcaagcgctttatcaaattatttagaaaatttaagttttatgcttgcaatttttgaaatagaatagtactattgcaagtgtaaagaggttaatttttgtcccacgcgggacttaaaaaggcaaccactggttgtgacatatccttatttacatttataaatataaggaggaggtagtagtgaaagacttattgcaagcacagcaaaagcttataccggatctcatagataaaatgtataaacgtttttctattcttactactatctcaaaaaatcagcctgtcggacgtcgaagtttaagcgaacatatggatatgactgaacgtgtactgcgttctgaaacagatatgcttaagaaacaagatttgataaaagttaagcctaccggaatggaaattacagctgaaggtgagcaactgatttcgcaattgaaaggttactttgatatctatgcagatgataatcgtctgtcagaaggtattaagaataaatttcaaattaaggaagttcatgttgttcctggtgatgctgataatagtcaatctgttaaaacagaattaggtagacaagcaggtcaattacttgaaggcatattacaagaagacgcgatagttgctgtaactggcggatccacgatggcatgtgttagtgaagcaattcatttattaccatataatgtattcttcgtaccagccagaggtggactaggcgaaaatgttgtctttcaggcaaacacaattgcagccagtatggcacaacaagctggcggttattatacgacgatgtatgtacctgataatgtcagtgaaacaacatataacacattgttgttagagccatcagtcataaacactttagacaaaattaaacaagcaaacgttatattacacggcattggtgatgcgctgaagatggcgcatcgacgtcaatcacctgaaaaggtcattgaacaacttcaacatcatcaagctgtcggagaggcatttggttattattttgatacacaaggtcaaattgtccataaggttaaaacaattggacttcaattagaagaccttgaatcaaaagactttatttttgcagttgcaggaggcaaatcgaaaggtgaagcaattaaagcatacttgacgattgcacccaagaatacagtgttaatcactgatgaagccgcagcaaagataatacttgaataagagataaaaagtttaatactttttaaatatcattttaaaggaggccattataatggcagtaaaagtagcaattaatggttttggtagaattggtcgtttagcattcagaagaattcaagaagtagaaggtcttgaagttgtagcagtaaacgacttaacagatgacgacatgttagcgcatttattaaaatatgacactatgcaaggtcgtttcacaggtgaagtagaggtagttgatggtggtttccgcgtaaatggtaaagaagttaaatcattcagtgaaccagatgcaagcaaattaccttggaaagacttaaatatcgatgtagtgttagaatgtactggtttctacactgataaagataaagcacaagctcatattgaagcaggcgctaaaaaagtattaatctcagcaccagctactggtgacttaaaaacaatcgtattcaacactaaccaccaagagttagacggttctgaaacagttgtttcaggtgcttcatgtactacaaactcattagcaccagttgctaaagttttaaacgatgactttggtttagttgaaggtttaatgactacaattcacgcttacacaggtgatcaaaatacacaagacgcacctcacagaaaaggtgacaaacgtcgtgctcgtgcagcggcagaaaacatcatccctaactcaacaggtgctgctaaagctatcggtaaagttattcctgaaatcgatggtaaattagatggtggtgcacaacgtgttcctgtagctacaggttcattaactgaattaacagtagtattagaaaaacaagacgtaacagttgaacaagttaacgaagctatgaaaaatgcttcaaacgaatcattcggttacactgaagacgaaatcgtttcttcagacgttgtaggtatgacttacggttcattattcgacgctacacaaactcgtgtaatgtcagttggcgaccgtcaattagttaaagttgcagcttggtatgataacgaaatgtcatatactgcacaattagttcgtacattagcatacttagctgaactttctaaataattttagtatagtttttattcaaatacgctagtgctcagaactatttagcattaattaaagcttatgagtaagcggggagcacaaacgcttctccgcttatttttatataaaatttcctaattacaaggaggaaacaccatggctaaaaaaattgtttctgatttagatcttaaaggtaaaacagtcctagtacgtgctgattttaacgtacctttaaaagacggtgaaattactaatgacaaccgtatcgttcaagctttacctacaattcaatacatcatcgaacaaggtggtaaaatcgtactattttcacatttaggtaaagtgaaagaagaaagtgataaagcaaaattaactttacgtccagttgctgaagacttatctaagaaattagataaagaagttgttttcgtaccagaaacacgcggcgaaaaacttgaagctgctattaaagaccttaaagaaggcgacgtattattagttgaaaatacacgttatgaagatttagacggtaaaaaagaatctaaaaatgatccagaattaggtaaatactgggcatctttaggtgatgtgtttgtaaatgatgcttttggtactgcgcatcgtgagcatgcatctaatgttggtatttctacacatttagaaactgcagctggattcttaatggataaagaaattaagtttattggtggcgtagttaacgatccacataaaccagttgttgctattttaggtggagcaaaagtatctgacaaaattaatgtcatcaaaaacttagttaacatagctgataaaattatcatcggcggaggtatggcttatactttcttaaaagcgcaaggtaaagaaattggtatttcattattagaagaagataaaatcgacttcgcaaaagatttattagaaaaacatggtgataaaattgtattaccagtagacactaaagttgctaaagaattttctaatgatgccaaaatcactgtagtaccatctgattcaattccagcagaccaagaaggtatggatattggaccaaacactgtaaaattatttgcagatgaattagaaggtgcgcacactgttgtatggaatggacctatgggtgtattcgagttcagtaactttgcacaaggtacaattggtgtatgtaaagcaattgcaaaccttaaagatgcaattacgattatcggtggcggtgattcagctgcagcagcaatctctttaggttttgaaaatgacttcactcatatttcaactggtggcggcgcgtcattagagtacctagaaggtaaagaattgcctggtatcaaagcaatcaataataaataataaagtgatagtttaaagtgatgtggcatgtttgtttaacattgttacgggaaaacagtcacaagatgacatcgtgtttcatcacttttcaaaaatatttacaaaacaaggagtgtctttaatgagaacaccaattatagctggtaactggaaaatgaacaaaacagtacaagaagcaaaagacttcgtcaatgcattaccaacattaccagattcaaaagaagtagaatcagtaatttgtgcaccagcaattcaattagatgcattaactactgcagttaaagaaggaaaagcacaaggtttagaaatcggtgctcaaaatacgtatttcgaagataatggtgcgttcacaggtgaaacgtctccagttgcattagcagatttaggcgttaaatacgttgttatcggtcattctgaacgtcgtgaattattccacgaaacagatgaagaaattaacaaaaaagcgcacgctattttcaaacatggaatgactccaattatttgtgttggtgaaacagacgaagagcgtgaaagtggtaaagctaacgatgttgtaggtgagcaagttaagaaagctgttgcaggtttatctgaagatcaacttaaatcagttgtaattgcttatgagccaatctgggcaatcggaactggtaaatcatcaacatctgaagatgcaaatgaaatgtgtgcatttgtacgtcaaactattgctgacttatcaagcaaagaagtatcagaagcaactcgtattcaatatggtggtagtgttaaacctaacaacattaaagaatacatggcacaaactgatattgatggggcattagtaggtggcgcatcacttaaagttgaagatttcgtacaattgttagaaggtgcaaaataatcatggctaagaaaccaactgcgttaattattttagatggttttgcgaaccgcgaaagcgaacatggtaatgcggtaaaattagcaaacaagcctaattttgatcgttattacaacaaatatccaacgactcaaatcgaagcgagtggcttagatgttggactacctgaaggacaaatgggtaactcagaagttggtcatatgaatatcggtgcaggacgtatcgtttatcaaagtttaactcgaatcaataaatcaattgaagacggtgatttctttgaaaatgatgttttaaataatgcaattgcacacgtgaattcacatgattcagcgttacacatctttggtttattgtctgacggtggtgtgcacagtcattacaaacatttatttgctttgttagaacttgctaaaaaacaaggtgttgaaaaagtttacgtacacgcatttttagatggtcgtgacgtagatcaaaaatccgctttgaaatacatcgaagagactgaagctaaattcaatgaattaggcattggtcaatttgcatctgtgtctggtcgttattatgcaatggaccgtgacaaacgttgggaacgtgaagaaaaagcttacaatgctattcgtaattttgatgccccaacttatgcaactgccaaagaaggtgtagaagcaagctataatgagggcttaactgacgaattcgtagtaccattcatcgttgagaatcaaaatgacggtgttaatgatggagatgcagtgatcttctataatttccgacctgatagagcagcacaattatcggaaatttttgcgaacagagcattcgaaggctttaaagttgaacaagttaaagacttattctatgcaacattcactaagtataacgacaatatcgatgcggctatcgttttcgaaaaagttgatttaaataatacaattggtgaaattgcacaaaataacaatttaacacaattacgtattgcagaaactgaaaaatatcctcacgttacttactttatgagtggtggacgtaacgaggaatttaaaggtgaacgccgtcgtttaattgattcacctaaagttgcaacgtatgacttgaaaccagaaatgagtgcttatgaagttaaagatgcattattagaagagttaaataaaggtgacttggacttaattattttaaactttgctaaccctgatatggttggacatagtggtatgcttgagccgacaatcaaagcaatcgaagcggttgatgaatgtttaggtgaagtcgttgataagattttagacatggacggttatgcaattattactgctgaccatggtaactctgatcaagtattgacggatgatgatcaaccaatgactacgcatacaacgaacccagtaccagtgattgtaacaaaagaaggcgttacacttcgagaaactggtcgcttaggtgacttagcacctacattattagatttattaaatgtagaacaacctgaagacatgacaggtgaatctttaattaaacactaatattgtaaaagatgttaagtaaacgcttaatgacacttattttttgaaaataatagtaatatcattttgttaaatgaaagaataaagctataataattatagaataactatttaaaggagattataaacatgccaattattacagatgtttacgctcgcgaagtcttagactctcgtggtaacccaactgttgaagtagaagtattaactgaaagtggcgcatttggtcgtgcattagtaccatcaggtgcttcaactggtgaacacgaagctgttgaattacgtgatggagacaaatcacgttatttaggtaaaggtgttactaaagcagttgaaaacgttaatgaaatcatcgcaccagaaattattgaaggtgaattttcagtattagatcaagtatctattgataaaatgatgatcgcattagacggtactccaaacaaaggtaaattaggtgcaaatgctattttaggtgtatctatcgcagtagcacgtgcagcagctgacttattaggtcaaccactttacaaatatttaggtggatttaatggtaagcagttaccagtaccaatgatgaacatcgttaatggtggttctcactcagatgctccaattgcattccaagaattcatgattttacctgtaggtgctacaacgttcaaagaatcattacgttggggtactgaaattttccacaacttaaaatcaattttaagcaaacgtggtttagaaactgcagtaggtgacgaaggtggtttcgctcctaaatttgaaggtactgaagatgctgttgaaacaattatccaagcaatcgaagcagctggttacaaaccaggtgaagaagtattcttaggatttgactgtgcatcatcagaattctatgaaaatggtgtatatgactacagtaagttcgaaggcgaacacggtgcaaaacgtacagctgcagaacaagttgactacttagaacaattagtagacaaatatcctatcattacaattgaagacggtatggacgaaaacgactgggatggttggaaacaacttacagaacgtatcggtgaccgtgtacaattagtaggtgacgatttattcgtaacaaacactgaaattttagcaaaaggtattgaaaacggaattggtaactcaatcttaattaaagttaaccaaatcggtacattaactgaaacatttgatgcaatcgaaatggctcaaaaagctggttacacagcagtagtttctcaccgttcaggtgaaacagaagatacaacaattgctgatattgctgttgctacaaacgctggtcaaattaaaactggttcattatcacgtactgaccgtattgctaaatacaatcaattattacgtatcgaagatgaattatttgaaactgctaaatatgacggtatcaaatcattctataacttagataaataatcattttaaacattaagtactgccataattttagttgaggattattatgtcggtataaattgaataaagtttttgagttcacgcttaaaaagttcacgcttgtatttataacctgccacagagttgagactgtggtaggttttttattttgaagtattattcataacagactaataatcatgaggtaactaataacacatatttaacttgtattcttaaactggtataataaatttatgttgaaatgaatattgtatgacagggtattcacttttattaaaaggtaaaattaaataaaggttttatagaacgtatttaaatatatgaggagtaaacaaatggctgatagaacgaataaagaaattaaaacaggacgctttattgcaactgcatcaatcgtattctcaatattattgattattcattactttgtttcgttggataatgcgactgccaaagcattacttaatttaacgaatcaaaacacttcagataaagcgattgattacattttaaacagctttagattcactggtattatgtatattttggcttatctagcaggcttcatcactttttggaatcgacatacttatgtgtggtggtttatgtttgcagtttatgtatcaaatagtttgtttacgttgattaatttatcaatcacaattcaagcaataaaagctgcacacggtgcgtacttaacattgccaattttaatcgttattataggttcggttgcattagcgatttatatgcttgttgtttctatcaaacgtaaaagtacatttaatcgctagaaaattgattttaacaataaaaatatgatatactacttgtcgtatataaggaacggaggacaatttatgcatacatttttaatcgtattattaatcattgattgtattgcattaataactgttgtactactccaagaaggtaaaagcagtggactttcaggtgccatcagtggtggtgctgagcagttattcggtaaacaaaaacaacgtggcgtcgatttattcttaaatagattaacaattattttatcaatattattttttgtacttatgatttgcataagttatcttggtatgtaaggtccggcgatgtaaatgtcgggcttttttatttataattaagaatgtaatagtttaacaataagctatgtaaaatatatagcctagttaagtatgcaaagggagcgttagatttatgcagataaaattaccaaaacctttcttttttgaagaaggcaaacgtgccgtgttattattacatggatttacaggcaattcgtctgatgtacgtcaattaggtcgatttttacaaaaaaagggatatacttcgtatgcaccacaatatgaaggtcacgcggcaccaccagaggaaatactgaaatctagtcctttcgtttggtttaaagatgcgttagatggttatgattatcttgttgaacaaggttatgatgaaattgttgttgctggtctatcattaggtggggattttgctttaaaattaagcttaaatagagatgtaaagggtattgtaacgatgtgtgcaccaatgggtggcaaaactgaaggtgccatttatgaaggctttttagagtatgcacgtaattttaaaaagtatgaaggtaaaaatcaagagactattgataatgaaatggatcattttaaaccaactgaaactttaaaagaactaagtgaagcattagatacgattaaagatcaagttgatgaggtatttgacccaattttagtgattcaagcagaaaacgacaatatgattgatccacaatccgcaaattatatatatgaccatgtagattctgatgacaaagacatcaagtggtatagtcaatcaggacatgttattacgattgataaagaaaaagaacaagtatttgaagatatttatcaatttttagagtcattagactggtcagaataaaaagagattttaacattagaaaggaggggcataatgaatttaaagcaatcaatagaagagattattaatcaacctgaatatgaacctatgtcagtgtcagattttcaagatgcattaggtttaagtagtgccgactcatttagagatttaattaaggtgctcgtagaattagaacaatcaggattaattgaacgtacaaaaacagacagatatcaaaaaaagcatagttcaaaaggtcattcaaaattgataaagggaacgttaagtcaaaataaaaaaggctttgcattcttaagacctgaagatgaggatatggaagatatatttattcccccaacaaaaattaatcgtgccttagatggagatactgtaattgtagaaatacatcaatctaaaggtgaacataaaggtaaaattgaaggggaagttaagtcgattgagaagcattcagtaactcaagttgttggtacgtatagtgaagctagacatttcggatttgttattccagatgataaacgtattatgcaagatattttcattcctaaaggacaaagtttaggtgcagtagatgggcataaggtacttgttcaaattactaaatatgctgatggttcagataatccagaaggacatatttctgctattttaggacataaaaatgatcctggcgtagatattttatctattatctatcaacatggcatagaaattgaatttcctgatgaagtgttacaagaagctgaagcagtacctgatcatattgaaaatactgaaattaaaggccgtcatgatttacgtgatgaattgacaatcacaattgatggtgctgatgctaaagacttagatgacgcaattagtgttaaaaagttagcgaacggtaatacgcaattaactgtaagtattgctgatgtcagctattatgtaacagaaggttctgcattggataaagaggcatatgatagagcgacaagtgtatatcttgttgaccgtgtaattccaatgattccacatcgattaagtaatggtatttgttcattgaatcctaatgttgatcgtttaactctaagctgtcgcatggaaatcgatgctagtggtcgcgttgttaaacatgaaatttttgatagtgttatacattctgattatcgaatgacgtatgatgcggtaaatcagattattactgaaaaggatcctaacattcgcgaacaatataaagaaattacgcctatgttagatttagcacaagatttatctaatcgtttgattcaaatgagaaaacgacgtggtgaaatcgattttgatattaatgaagcaaaagtattagttaacgaagacggtataccaacagatgttcaattaagacaacgtggcgagggtgaacgtctaattgaatcatttatgttaattgcaaatgaaacagttgctgaacattttagtaagttagatgtaccttttatttaccgagtgcatgagcaacctaaatcagatcgcttaagacaattctttgattttattacaaactttggcatcatgattaagggtactggcgaagatattcatccaacaacacttcaaaaggttcaagaagaagtagaaggtcgacctgaacaaatggtcatttcaacaatgatgttgcgttcaatgcaacaagcgcattatgatgatgtgaacttgggacattttggcttatcagctgaatattatacgcattttacatcaccaattagacgttatcctgatttaacagttcatcgtttaatccgtaagtatttaattgagaaatcaatggataacaaagaagtgaagcgttgggaagacaaattgcctgagttagctgaacatacttctaaacgtgaacgtcgtgctattgaggcagaacgtgatactgatgaattgaaaaaagcagaatatatgattcaacatattggtgatgaatttgaaggtattgtcagctcagtagctaacttcggtatgttcattgaattgccaaatacgatagaaggtatggttcatattgcgaatatgactgatgattattaccgttttgaagagcgtcaaatggcattaattggtgagcgtcaagctaaagtatttagaattggtgacacagttaaggttaaagtgacgcatgttgatgtagatgaacgattaattgattttcaaattgtaggtatgcctttaccgaaaaatgatcgatcacagcgcccagcgcgaggtaagacaattcaagccaaaacgcgtggtaaatcattagataaatcaaaatctgatgataaaggacgtaagaaaaagggtagtcaacgtaaaggtaaaaatgaacgcaaaaatgacaaatcaggaaatagtaaacataagccattttataaagataaaagtgtgaaaaagaaagcacgtcgtaagaaaaaataagcagcaatgaggtgagtatgaatggctaagaagaaatcaccaggtacattagcggaaaatcgtaaagcaagacatgattataatattgaagacacgattgaagcgggaatcgtattacaaggtacagaaataaaatcgattcgccgaggtagtgctaaccttaaagatagttacgcgcaagttaaaaacggtgaaatgtatttgaataatatgcatatagcaccatacgaagaagggaatcgttttaatcacgatcctcttcgttctcgaaaattattattgcataaacgtgaaatcattaaattgggtgatcaaacacgtgaaattggttattcgattgtgccattaaagctttatttgaagcatgggcattgtaaagtattacttggtgtcgcacgaggtaagaaaaaatatgataaacgtcaagctttgaaagaaaaagcagtcaaacgagatgttgcgcgcgatatgaaagcccgttattaagcgatttagttgcttaatcgggctatatttgatatagttatatgtgcttttgtaaattacaaaagtatgatttgtttgatttattatttcggggacgttcatggattcgacaggggtcccccgagctcattaagcgtgtcggagggttgtcttcgtcatcaacacacacagtttataataactggcaaatcaaacaataatttcgcagtagctgcctaatcgcactctgcatcgcctaacagcatttcctatatgctgttaacgcgattcaaccttaataggatatgctaaacactgccgtttgaagtctgtttagaagaaacttaatcaagctagcatcatgttggttgtttatcacttttcatgatgcgaaacctttcgataaactacacacgtagaaagatgtgtatcaggacctctggacgcgggttcaaatcccgccgtctccatatttgtagcctacaacctttgtggatgtgggcttttttatatgttttttatctattcttgtgaggaaggttaaattagctgtgtacgttgatatgatagtatttgcttaggttcaaattttcatgaatgaaaaattaatacttgtgtacatataagattttgcgttaagggttgaaagaatatgtgtcaaataagtgtcaaaaaagttgagcttagagttttaatattgttcataaaaaaattctttatataagataattcttcattcaaaacaacaaaaaagagtaggcgagctactcttttttgttgtatttaacaattaaattagtgtgtcattatgagtgtaggtaagctaatttataatgacaataataattacaaagattataacgctgtatgcgagcattcataaatttatacttcatctaaactactgtggtcgtcatctttttgcttttctttttctttctctcgttcttgttcttttttgtactcttcttcaaattctttttctttcttttctacttcttctcttgtttccgctctatgagaaaaatcctcggttttaagtttactaaatttgaatgatttagaatcaactgttttatcttctgagtatttatggacatttaaattaatatttccatcacctcttaactcatagataaacatggcttgtgcagttttgccttttttaatttgatcttggttatgttctgtccaatctttatattttttatcacttaaaagataaccatctcttaatttatttactgtatttttatcatcttgagtgatattaatatagtcatgagaaatagaagatggatttaagtctttatcgtcttttttagcagtaatttccattttaaaagcgatatatttctttttctcatctttttcattgatgataaacggttcttttattttagcttcaaatttgtcactaacaatagtatcgcctttaatttttatatccatattttttttgcttttaaattctttaagttcttcatttaattcttcattgtcattttctttctttttgtgactagtgctctctttttttgcactatcttgatgatgtccacaagcacctaagataagtgtacttgctaataatatccccattacttttttcatttaacatgtctcctttatttcgcaaaaatttattttaaaaactctaaatgacttatcattttgagtaattaaacaaagttgatattttgtgagattctaagatgatattaaataattcttgtaataatgatcctatgtattgttgcaataaattaatgaaactataattactaatattatattacttttattgatagaaatatattacttttttaaaaaacttgtaatatatcgaaagatttaaatgtaaaattttgatttgttaagaaattacgtttgtaaaaataaaaaaatcaacttatttgtatgagataaatatgtattgaagaagaagtgttattaatttggaaaatactggtcaaagatgggagctctcaaaagcgttattgtattttttagtcaatacaaatagattgccgtaataataatcgtacttgatggttaaaaaattacttaaggctataaagcaaaactttttatatgagcagtcgaatataacgtttaaaatgattgtttttggatataaacgattaagtaaaatgctttttcagtttgaaattaatcatataaatttcttatgggaaggttgatatcttaatgattaatattatttcagctataggatctattggaacatttattatggctttattttattttgtatcagtttcagttcaactttatcaaatgaaaattagctttctgccagctttaggttttaaccaaattttattagaaagggaggaggatcaacttaatataatgaattcggcaacagaagagcatcatcataaagattatattaaactatataatttaggtggcggtgctgctaaaaaaattgcaatagaggttttattgggtaatgataaagtcattcagaaaaaatacgtgaatattttacctagtaaagaagggtacatgttaccaattaataaaaatgtgtacgaagaattagaaagaacgattgagaacaatggttatgaagctgatttgaatgtacgtatgacttattatcataatgtaagtcgcaaacaacaggaagttatattaaaaggtcaaatcgactgttttaatacttataataataaagaaatttatgatttgcagtttatctaaaaattgatttaagagggtagttgtttattgcgaaaaatatcattcaattttaatgaaataatggcgtcattactataaaatattactttatgttgtaatgcatttttctataagatagaactaaaaggaggggcaaagatgcaaattagacaaatacatcaacatgactttgctcaagttgaccagttaattagaacggcatttgaaaatagtgaacatggttatggtaatgaatcagaactagtagaccaaattcgtctaagtgatacgtatgacaataacttagaattagtagctgttcttcaaaatgaagttgtagggcacggtttactaagtgaagtttatcttgataacgaggcacaacgggaaattggattagtgttagcacctgtatctgttgatattcatcatcaaaataaaggtattgggaagcgattgattcaagcattagaacgagaagcaatattaaaaggatataattttatcagtgtattaggatggccgacgtattatgccaatctaggatatcaacgcgcaagtatgtacgacatttatccaccatatgatggtataccagacgaagcgtttttaattaaagaattaaaagtgaacagtttagcgggaaaaacaggtaccataaattacacatctgcttttgaaaaaatatgatttcaagctaggattacattaggtagagttcatattaataataaaaaatgtttgcaatgaaatcgtgcattgtcgtttgcaatttttaaaatagcaataaataaaatgtttgttagtaaagtattattgtggataataaaatatcgatacaaattaattgctataatgcaattttagtgtataattccattaacagagattaaatatatctttaaagggtatatagttaatataaaatgactttttaaaaagagggaataaaatgaatatgaagaaaaaagaaaaacacgcaattcggaaaaaatcgattggcgtggcttcagtgcttgtaggtacgttaatcggttttggactactcagcagtaaagaagcagatgcaagtgaaaatagtgttacgcaatctgatagcgcaagtaacgaaagcaaaagtaatgattcaagtagcgttagtgctgcacctaaaacagacgacacaaacgtgagtgatactaaaacatcgtcaaacactaataatggcgaaacgagtgtggcgcaaaatccagcacaacaggaaacgacacaatcagcattaacaaatgcaactacggaagaaactccggtaactggtgaagctactacggcaacgaatcaagctaatacaccggcaacaactcaatcaagcaatacaaatgcggaggaattagtgaatcaaacaagtaatgaaacgacttctaatgatactaatacagtatcatctgtaaattcacctcaaaattctacaaatgcggaaaatgtttcaacaacgcaagatacttcaactgaagcaacaccttcaaacaatgaatcagctccacagagtacagatgcaagtaataaagatgtagttaatcaagcggttaatacaagtgcgcctagaatgagagcatttagtttatcggcagtagctgcagatgcaccggcagctggcaaagatattacgaatcagttgacgaatgtgacagttggtattgactctggagatacagtttatccgcaccaagcaggctatgtcaaactgaattatggtttttcagtgcctaattctgctgttaaaggtgacacattcaaaataactgtacctaaagaattaaacttaaatggtgtaacttcaactgctaaagtgcctccaattatggccggagatcaagtattggcaaatggtgtaatcgatagtgatggtaatgttatttatacatttacagactatgttgatactaaagaaaatgtaacagctaatattactatgccagcttatattgaccctgaaaatgttacaaagacaggtaatgtaacattgacaactggcataggtagtacaacagcaaacaaaacagtattagtagattatgaaaaatatggtaagttttataacttatctattaaaggtacaattgaccaaatcgataaaacaaataatacgtatcgtcagacaatttatgtcaatccaagtggagataatgttattgcgccggttttaacaggtaatttaaaaccaaatacggatagtaatgcattaatagatcagcaaaatacaagtattaaagtatataaagtagataatgcagctgatttatctgaaagttactttgtgaatccagaaaactttgaggatgtcactaatagtgtgaatattacattcccaaatccaaatcaatataaagtagagtttaatacgcctgatgatcaaattacaacaccgtatattgtagttgttaatggtcatattgatccgaatagcaaaggtgatttagctttacgttcaactttatatggatatgactcaaggtttgtatggagatctatgtcatgggacaacgaagtagcatttaataacggatcaggttctggtgacggtatcgataaaccagttgttcctgaacaacctgatgagcctggtgaaattgaaccaattccagaggattcagattctgacccaggttcagattctggcagcgattctaattcagatagcggttcagattcgggtagtgattctacatcagatagtggttcagattcagcgagtgattcagattcagcgagtgattcagattcagcaagtgattcagactcagcgagtgattcagattcagcaagcgattcagattcagcgagcgattcagattcagcgagtgattcagattcagcgagtgattcagattcagcaagcgattccgactcagacaatgactcggattcagatagcgattctgactcagacagtgactcagattccgatagcgattcagattccgacagtgattccgactcagacagcgattctgactccgacagtgattccgactcagacagcgattcagattccgacagtgattccgactcagatagcgattccgactcagatagcgactcagattcagacagcgattcagattcagacagcgattcagattcagatagcgattcagattccaacagtgactcagattccgacagtgactcggattcagatagcgattcagattccgacagtgactcagattccgacagtgactcagactcagacagtgattcggattcagcgagtgattcggattcagatagtgattccgactccgacagtgactcggattcagatagcgactcagactcggatagcgactcggattcagatagcgattcggactcagatagcgattcagaatcagacagcgattcagaatcagacagcgattcagattcagacagcgactcagattcagatagtgactcggattcagcgagtgattcagactcaggtagtgactccgattcatcaagtgattccgactcagaaagtgattcaaatagcgattccgagtcaggttctaacaataatgtagttccgcctaattcacctaaaaatggtactaatgcttctaataaaaatgaggctaaagatagtaaagaaccattaccagatacaggttctgaagatgaagcaaatacgtcactaatttggggattattagcatcaataggttcattactacttttcagaagaaaaaaagaaaataaagataagaaataagtaataatgatattaaattaatcatatgattcatgaagaagccaccttaaaaggtggcttttttacttggattttccaaatatattgtttgaatataattaataattaattcatcaacagttaattattttaaaaaggtagatgttatataatttggcttggcgaaaaaatagggtgtaaggtaggttgttaattagggaaaattaaggagaaaatacagttgaaaaataaattgctagttttatcattgggagcattatgtgtatcacaaatttgggaaagtaatcgtgcgagtgcagtggtttctggggagaagaatccatatgtatctgagtcgttgaaactgactaataataaaaataaatctagaacagtagaagagtataagaaaagcttggatgatttaatatggtcctttccaaacttagataatgaaagatttgataatcctgaatataaagaagctatgaaaaaatatcaacagagatttatggctgaagatgaggctttgaagaaattttttagtgaagagaaaaaaataaaaaatggaaatactgataatttagattatctaggattatctcatgaaagatatgaaagtgtatttaatactttgaaaaaacaaagtgaggagttcttaaaagaaattgaagatataaaaaaagataaccctgaattgaaagactttaatgaagaggagcaattaaagtgcgacttagaattaaacaaattagaaaatcagatattaatgttaggtaaaacattttatcaaaactatagagatgatgttgaaagtttatatagtaagttagatttaattatgggatataaagatgaagaaagagcaaataaaaaagcagttaacaaaaggatgttagaaaataaaaaagaagacttagaaaccataattgatgaattttttagtgatatagataaaacaagacctaataatattcctgttttagaagatgaaaaacaagaagagaaaaatcataaaaatatggctcaattaaaatctgacactgaagcagcaaaaagtgatgaatcaaaaagaagcaagagaagtaaaagaagtttaaatactcaaaatcacaaacctgcatctcaagaagtttctgaacaacaaaaagctgaatatgataaaagagcagaagaaagaaaagcgagatttttggataatcaaaaaattaagaaaacacctgtagtgtcattagaatatgattttgagcataaacaacgtattgacaacgaaaacgacaagaaacttgtggtttctgcaccaacaaagaaaccaacatcaccgactacatatactgaaacaacgacacaggtaccaatgcctacagttgagcgtcaaactcagcaacaaattatttataatgcaccaaaacaattggctggattaaatggtgaaagtcatgatttcacaacaacgcatcaatcaccaacaacttcaaatcacacgcataataatgttgttgaatttgaagaaacgtctgctttacctggtagaaaatcaggatcactggttggtataagtcaaattgattcttctcatctaactgaacgtgagaagcgtgtaattaagcgtgaacacgttagagaagctcaaaagttagttgataattataaagatacacatagttataaagaccgattaaatgcacaacaaaaagtaaatactttaagtgaaggtcatcaaaaacgttttaataaacaaatcaataaagtatataatggcaaataattaatgcatggctgcaaagcaaataatgagtttgtcgtaaaaataacaacattttaaactagcaataaataatatcaaagtcatcatttcaatgatgcaatctagtatagtccacattctaaacaggtgtggactattacttttttcactttatattacgaaaaaattattatgcttaactatcaatatcaataattaattttaagctgaaaaacaataaaaatgttaagacaacgtttacttcaagttaattattatactgaaaattctggtatataatgctgttagtgaatataacagggaaattatattggttataatattgagtctatataaaggagaaataacagatgaaaaagaaattattagttttaactatgagcacgctatttgctacacaaattatgaattcaaatcacgctaaagcatcagtgacagagagtgttgacaaaaaatttgtagttccagaatcaggaattaataaaattattccaacttacaatgaatttaaaaaagcaccaaaagtaaatgttggtaatttagctgacaataaaaactttgtagcttctgaagataaattgaataagattgtagattcatcggcagctagtaaaattgtagataaaaactttgccgtaccagagtcaaagttaggaaacattgtaccagagtacaaagaaatcaataatcgcgtgaatgtagcaacaaacaatccagcttcacaacaagttgataagcattttgttgctaaaggcccagaagtaaatagatttattacgcaaaacaaagtaaaccaccacttcattactacgcaaacccactacaagaaagttattacttcatacaaatcaacacatgtacataaacatgtaaatcatgcaaaggattctattaataaacactttattgttaaaccatcagaatcgcctagatatacacatccatctcaatctttaattatcaagcatcattttgcagttcctggatatcacgcgcataaatttgttacaccagggcatgctagcattaaaattaatcacttttgtgttgtgccacaaataaatagtttcaaggtaattccaccatatggtcacaattcacatcgtatgcatgtaccaagtttccaaaataacacaacagcaacacatcaaaatgctaaagtaaataaagcatatgactataaatacttctattcttataaagtagttaaaggtgtgaagaaatatttctcattttcacaatcaaatggttataaaattgggaaaccatcattaaatatcaaaaatgtaaattatcaatatgctgttccaagttatagccctacacactacgttcctgaatttaagggtagcttaccagcaccacgagtataaaaattggcactaagtttacgagatatgataaatacctattattttaaatatagtctacaatctatgtggttgtaggctgtattttttgcagtttatcaataaacacccatcaacaaattataccgtttttctactttgaaagttggaagtaacataatcttaaataaatatattattaattaagataaatataatactcaagattattgttaatagtttgttcatcgcaagttaattattgtttctaaaatattggtatataattttcaatggcgaagaaaacagggtgaaaaagtcggtttttaaatcaaagcaaataagggagcataaacaaatgaaaaggaaagtattagtactaacaatgggtgtaatttgtgcaactcaattatggcattctaatcacgcaaacgcattagtatcagagagtgttgaaactaattttgttgtaaaagattcggataataaaaatattttacaaacccatactgaaattactactgaggagaaattttcagtagtagaaaagagtcaattaaatacactaaaatcactatctaatgacaactacatagaatatgatttacatactaatcaaacaggcataaaaaaaggttggttatatggttatagtgaaattgactcatcacatttcacagaccgtgacaaacgcgttattagacgtgatcatgttaaagaagcacaaagcttaattaatgattataaatatacgcaaaaatatgaagatctcgctaaggcaactgcaaaagtaagtacacttagtcagtctcaccaaaattatttgaataaacaaattgataaagtgaataataagatagagaaaactgaaaaacgctaatccaaagtaaattataagttatacatctcgtttttaaatgacaatttatccccgtaaatattataaataatcttttcaaattccacatagatatagagacactaataaacctctttgtctcgatatgatagtctgcaacgattcatgttgtaggctttttaattttacaaataaggctaaatatataagttctgacacctaaaatatagaaaatacataaaagtaagtatagttattttattataattattaaatttttattaattaattgtaaaaatgtagaattataattaattaacgtttaatattaaaattaactaaaaagaaagaggtgttagttatgacagaatacttattaagtgctggcatatgtatggcaattgtttcaatattacttatagggatggctatcagtaatgtttcgaaagggcaatacgcaaagaggtttttctttttcgctactagttgcttagtgttaactttagttgtagtttcaagtctaagtagctcagcaaatgcatcacaaacagataacggcgtaaatagaagtggttctgaacatccaacagtatatagtgcaacttcaactaaaaaattacataaagaacctgcgacattaattaaagcgattgatggtgatacggttaaattaatgtacaaaggtcaaccaatgacatttagactattattggtggatacacctgaaacaaagcatcctaaaaaaggtgtagagaaatatggtcctgaagcaagtgcatttacgaaaaaaatggtagaaaatgcaaagaaaattgaagtcgagtttgacaaaggccaaagaactgataaatatggacgtggcttagcgtatatttatgctgatggaaaaatggtaaacgaagctttagttcgtcaaggcttggctaaagttgcttatgtttataaacctaacaatacacatgaacaacttttaagaaaaagtgaagcacaagcgaaaaaagagaaattaaatatttggagcgaagacaacgctgattcaggtcaataatgctcattgtaaaagtgtcactgctgctagtggcacttttataatttttggatcacgatatgatttattatcaattcagaattaaaaaagtaaatagtatcaaaagcaagtgtatttaatattagaaaataaaaattttaaatttagtattaaaatggaatattactatatagttcaatgtgtattatcacagaaaataaaataatgctttacttctatatttaaaagtgtataatgaaagttaagtaataaagagcgtgaagaaaaatgtgagttatttatatagaatattctccttttcatttatgaatttgttacaaaatatttagtgcaaaagcacgacggaggtattcaatatgaataacggtacagttaaatggtttaatgcagaaaaaggttttggtttcatcgaaagagaagatggtagcgacgtattcgtacacttctcagcaatcgctgaagatggatacaaatcattagaagaaggccaaaaagttgaattcgacatcgttgaaggcgaccgtggcgagcaagctgcaaacgtagttaaaatgtaattttaacttattcaaacagtccttattatagggctgttttttaatgctttaaatcgataacagttggtgtggtaaaagcactagccgttatttttttgtccaataaatttaggtggagatttaacaatatataatggttctaaaatagatcgaactgatggaaaagttttttacttttcatctgtccgacttttgattttgaatataaaaaagcgccaatacagaactttaataatgacgagaattaaagtctgtatatggcgataacaagaagtaatgttaaacactcaaaatgtttaacaataataggataccacatcgcataatatcttactacttaattaataatttaactaatcaactttttgttaattttttattaagactgattaattattgagaatatttattgtttttaaaatctcataataattcagtaatcttgttttcatttaaaaggcgaaacattaaaataattaaataaaaatattgcgtttaatttacagcgtcaaatatacttatttctaatgctttggggtctactgaaacaagtaaagaatgatcgatgttactaatattgccattctccaaatttatttctgtgagtatttggaagctaccattaggcaacggtttaacaatagacaattgcttttccgcttgttgtattaaaaaaggttttgtagattgattattaatatgccattcactcatgtatgtttttcactcctgctttaaaatagggttagaaagtttatagttgagacattcatgttcaaccaaaattttgttcgaattcaataaatgtcttgtttaaaatagaaatattgtaaatgttatcgtccaaaacttcaccagttaagtatttgttttgaattaaaatttggcagttagttaagaagtcttgataatcacgatcacaaaaatagttttcacgtgcatctttagcatcgccaaaaaagttagcgactgtttctgtttctccattattcgaacgttcaatatataatttgtaaaatttagctattgtatacttttgttctttagttagttcattcaaaatattgggcctcctgaaatatcatttgtaatctatacccaatttattgcaaaacacaaactaatttaactatttgatgaaactgtgttaataagctttaacaagccttagtttgtatggatctataaaattatctttaattgcatagggtgaaataatatgtaatccataacttttaactgatttttcacttacaccaaatttataagcttggtagataattttagtacaatacgtaaattttttgctgttcaaatttaatgtaactagataacgatgatttgtattctcatagtttttcttaacccattcagccgcttttttacctgcaccaggatagctgcaacgataaactttcatccaatcatttttgccacttgcataattatatttaaaagattcgaaggattgtgtagttggtttgtcgccaggcccctcaatttgtaaaatcgttttatcatcaatcgcgatactacaatgaccaaaaaatccccacatgacagggccttttgtaacaataatatcaccaggttgtaattggaatttgtcatcttgaatttctgaatacttattatctgcaattgtttttggtgagtttattggggatacgacaacgaataatataagtaaaattatcgttcgtttaatatagttcacttaaaagctccttgttgaagaaatatatgtaaatagtcttaaattagaattgtaatctttaataagcttgtaagactaaaacatatcttaaatattaaagtatgagagtgtgaaatgtctattaagaataaaaaacagtctgaaacatcattgagacgtttcagactggatataaaatgaatttcatttatagcacaccaaatataaatgtgtatattaatatagcgaatccaaaaatatagagaatgacagtgaaacttaaataggactcttttttagattctttgccagtttttttcattaatacgagtataaacgtagcggcaactaagaaaattaatgctagccaaaacagaattgcaaaatgtaaagacatgtgaaaccctccttatataccgtaattattaacctataaaactataaaaaataggataaatgtaatagagaacgagtacgatatttataaaaaataatatttcacttaaccagtttttagttatcattgcaatggtaaaggatacgatgagtatcacaccacaaatgataataccaggcaggagccaacataaatcatctaaatctttattatatgtgattaaaatattaaagataacaaaagtggtagtaataactatattgatagcatttaacaaaatgttattcatgactgacacctactagtataaaaatagcttcttaataaatatgataacactattttccaataggtaaataaaaagtatagttatttttaaaatattatttgtagaatgctaaagtttattaattcaaacgagtgagcatatatagggatgtatagtattaatatgaaaagaatatttacatactaaaaactcttaaagttgtataattcgttaatatttttagaatcagataacaaaaaatgtgcaaaatcacttttgcacatttacaaatactagttttctgataagattaataataacactttaaatagcgcttaataaatgaagggggcaagtcttatgacgttttacaatttcatcatgggttttcaaaatgataacacaccatttggtatattggccgaacacgttagtgaagataaagcattccctcgattagaagaaagacaccaagtaattagagcatatgtgatgtctaattacacagatcatcaattaattgaaactacaaatagagctattagcttatatatggcaaattaatttgagtagtaccaattatgatgtattagtgcatcccaaatatcttttgttttaaagtttatttcatcatttcttatcgaaaatggtgtaataatgtctttatctaaccaagtgttgataagttcatttggtacaccatctaacaacatttcacttttactaattataaaacattcccagtcaagtgaaacattttgtggattcacataattacattgattatgattatccataaacactcactcctttaaaattctgtactcttcattgcgttttaccccgtcacattatcttttaaactaaaatcatcattacttatgaaaaaatgtacatcaaaagcaaaggttttcgctaccgaaaaagtttaaataatggtttaatatatttggtactcattttaataaaaagagaatacattttgagctatcaatactttttattgaagaggtgttattgttggctaaaacgttatatttaatgcgccacggacaaactttgtttaattttaagggactaattcagggatttggagattcgccgctaacagaacttggaattgctcaagctcaaaaggcacgtagttattatgaaactaaggggataaacttcgatttatatgcatcatcaacgcaagaacgcgcaagtgacacacttgaaaatgttgcacctaaccaatcgtatcaacgttttaagggactgaaggaatggcattttggattatttgaaggtgagtcagtctatctatttgataatctatacaagcctgaagacttattcggagatcgaattgttcctttcaaaggagaggcaaggcaacaagttgaagatcgcattgtgaaaactttacatgacattatgtctcaaacaaagaataatgcattagtcgtgagtcatggaacaataatgggagtatttttaagatattgccttaaactagatgaagcattaaagcataatatcggtaattgtaatatcctgaaatttgaatatgacaatggaacatttaaatttgttgagttaattgatccaaatttataataaataaagcgttatacatagacacaagcatgtcttttgtataacgctttagaataataattgaataagtttttgtaatatcatcagagcaacaataataattattatgcttgataatttattgattattgttaataattttccggttttatcaattgatccaaccatttctcctaaaattgcgagtaaaaagaaccataaccatgaaacgctaatacaagcgattgtaaacgcaattttattgctgccactatataatgcagcactactaccaattacaccaattgtatctaaaatagcatgtggattgagtaatgaaactgataaagcaaaacttacttgtttcattggagacataatttgagcttctccatctgttgagggtttatcatgccaaatggtccaagccatatacatcaagaaaattaaaccaactatataaataattgcttgaagtacaggtaaagacataataatgatagatactcctaccactgcaataataataagtaagctgtctgacaacccggctgcaattattgcaggcaatacatatctatattttggttgattagctccttggttaaaaataaatacattttgtgcacctaaaggtaaaattagaccaatcgctaagataaatccatgaataattgcggttaccattaagttttgacacctctaaaacatagaatattctgaaaaaacttattgttatcatatcaaataaaaaacaactactcaatagtagagtagttgtatgaaaaatagaacctatatgatttgaatttatgagaaatgtagaatatataaaactgtattacttattaatcaaatcataaaaaagccaatgttcatcgaaataggtatttccgattttaattgcatttttctcaaaaccaagaatgtcgaatcctagtgcactatagaaaactttagcacctatgttgtttgacacaattgatgtaagtaaagattcgtaattgttctgccgtgcataattaataatgaaattaatgagctcgctattaatcgatttatcgttattagtaacaaagttgtatttaattaatgatttatgttcttttccaacgtatcgaatttgttctaaggcagctgttgcgataagtgtttcgttttcataacagccaaatacaatacatttcggtgaaccttgatttaaaatgtcatgtattaaggtgtcagtcattgtttgactataatgtgaatcttgagtgaattcttcattgactgtcgaaacaagtctcttatactcattaaaatcattattcgttaatgttttaatttctatcattactgacctccttaatcattattaagaaagattttgtactaaaaaaatttcttaattacatattaaaatgtttattaaaattttgcaatcactgatttatatgcacattcttgtaaatggattatcaatttaattatatttatttttaagttcaggaaattatggaattggttattggtcgacactggacttttatttgtagacggtatgcgaagaagtcaagccagtattggaaccggtcacatttatgatgactaagggacaatcattttcagttaaatattgccagaaatttcagtcacgaatagaaaaaataaccaaccaaaaatttttggttggcaaatttgaattttatgtgaattttattaataacgttgaataatctctttaagttaatgctaatctacaacatttacatttaaatcgacattaatatttccttgagtcgcttttgaatatggacaaaattcatgagccatttgtaaatatttttcagcttcttcttgagatataacatttttaattgtcgcatcaattgaaacacttaatttaggactttctgagtctgaatcatcttctagtctcactgttagtgttacttctggatgagcatcacgcactttgttttgctttaaaattaggtcgaaagcaccgttgaagcaagatgcataacctgctgcaaataattgttcggggttagtagctttaccatctgcttgagcaggcgaaacgatatcaatatctaacgctcgatcatcagtataaacatgtcctttacgtccgccaacattcgtcgctttagtttcataatgtattgccattcttataacctcctaatttaaaatacatttatgctttacccattcgaaaataccttaatcattttcatttatagcattgtttgattgaaggataaaaagttgttgtttacaataaaaataatgagtatctgaaatgagggatttactatgacacatgtggaagtagtagcgactatcgcgccacaattatctatcgaagaaactttaattcaaaaaattaatcatcgtattgatgcaatagacgtattagaattacgaattgatcaaattgaaaatgtcacagttgatcaagtggcagaaatgattacaaagctgaaggttatgcaagattcattcaaattattagttacgtatcgtacaaagttacaaggtggctatgggcaatttataaatgacttgtatcttaatttaatatcagacttagcaaatatcaatggcatagatatgattgatatagaatggcaagcagatattgacattgaaaaacatcaacgaatcattacacacttgcaacagtataataaagaggtggttatatcacatcataatttcgaaagtacgcctccattagatgaattgcaatttatattttttaaaatgcaaaaattcaacccagaatacgttaaattagcagtaatgccacataataaaaatgatgtgttaaatttattgcaggcaatgtctacattttcagatactatggactgcaaagttgttggtatttcaatgtctaaacttggactaataagtagaacggctcaaggcgtttttggtggtgcattgacttatggttgtatcggagaaccacaagctccaggacagattgatgttactgatttaaaagcacaagtgactttatactaataaaatgaattaggttgcttttgtgtaagtgctgtcttataattgagaagtattatcattgttcgtggaggagcgattttagatggaattacaacaagcaatagctaatagaagaagtgtgaaaaaatttaaaagagatatgcacatagatgacgcattgctatatcaagcaattgagaaagctgctgatgctccaaatcacggaatgagggaaccatggagagttgtgcatgttccgaaagacagattaggagatatgagtaaggatatttctaaatttgcatttcctaatgaattagataagcaacaatgtcattatgatgcagttacgaaactaggtggcatgttattgcttattttaaaaacagatccaagacaacgtcaaaatgatgaaaactactttgcatttggtgcatatgcacaaaatcttatgttgttactttatgaagcgggaataggtacatgttggaaatcgccattatatatctatgatcctaaagtaagaaaaacacttggtataaagaaagatgaagttctttctggattcttatatttaacggatttagaagaagatatgcctaaagcaccacgtaaaaatagaaacttaattacattatattaatatgtataattatagaaacattaataaaagctgagtcatgaattgatggacatctatcgagttagagatttaatctaacttactagagtcggtacaatcacagtctcagctttttattgtgcagtatatacacatttttattttagtatttatttaaaagtttctgctaaaaatgattcaacttgctcaggtgacttagcatttgctgaatgaaggtgtgcaattttgtcgccgtttttaaatactagcaagctagggatacccataacttcattttcaacaactacatcttctaattcatcacgattaacagtataccattggtaatctttatattgttctacgattgggtcaatccataaatccatagcacgacagtctgggcaccatcctgcctcaaatttaacaattacaggtgtatcgctattaatcacagatttaaatgattcattacttttgattgcttgcattgtaacaactcctctagatagtttaataatttttattatagctaaatttataacataataaaaaattttagcttcaaaatgaaagccttttgctatggaaaatgatatatttattttaaatacataaaggaggttgcagtcgtatgattaaattttaccaatataagaattgtacaacttgtaaaaaggcagcaaagtttttagatgaatatggcgtaagttatgaaccaattgatatcgttcaacatacacctacaataaatgaatttaaaacaataattgcaaatacaggcgtagaaattaataaattgtttaatacacacggcgcgaaatatcgtgagcttgatttgaaaaataaattacaaactttatcagatgatgaaaagttagagttgttatcatctgatggtatgttagtaaagcgtcctctagcagtaatgggcgataagataacgttaggatttaaagaagatcaatataaagagacttggttagcgtaagtataatgtaaacgtttactaaatatctcgatatttagattcattacatgtaaaatgaaataagctatacaattgttaatttttataaatatagttgaatagcatctagccttatggcatcattaatgatgtaaagattaattaggaggggattctcttggcagtaccaaatgaattgaaatattcaaaagagcatgaatgggttaaagttgaaggtaatgtagcaacaattggaatcacagaatacgcacaaagcgagttaggtgatattgttttcgttgaattaccagaaacagatgatgaaattaatgaaggggatacgtttggtagcgtagaatcagttaaaactgtatcagaattatatgcaccaatctctggtaaagtagttgaagtcaacgaagaactagaagatagtcccgaatttgtaaatgaatctccatacgaaaaagcatggatggtaaaagtagaaattagtgatgaaagtcagattgaagctttattaacagctgaaaaatattcagaaatgattggtgaataatcaccgtgtaactccttaatctaagattgaggagtttatttttagtctgagtaagtaaataatatgaaagaaaatttattaggtactattatttggagtattgctacattttattattcaagaatgatgaaaataatgaatttagctattttaaaaataaaaattgggggaagttaatatgctaaacattcaagacgttagtcatctttctaaaaaggagcaaaaagcatataaccgtttcgtagaatctgtagaaaacggtaatttaccagtactaccatgtattgaaatggttctaaaagagatgaaagaagaaacattaaaccagagtaagattggtggaatgccatttttaaaatcttttaaagatataccattagatgaaaataatgtaccaatggtattgttagcacagattaatttggataatcttccagaacaacaagaattatttcctgtaaaagaagggatattgcagttttggattagttcagaagatcaaatgtatggtatgtctgaaaatttaaagggaaacaatataaactcaaggcttgtttatataaaagagccaattacagatttatcactcgaaaatattcaagcgcatttgaagtcattagatgctgataatgaggatatcccgttcagtggagcattttctatagaatttagattgtcgaaacaaactattacatgtactgattataagtacgatgaggacgtgcttgcattgtggaataaagtcaatccatccttcgcgctaaaatcaatgtttggtggttatgatgaattgatggaacctgtgtgtaacacatttactgctaaggaaccatttaatcaacttggtggttatccatattttgaccaaatagatccaagaacgaacgatcaagaactgaaaatgtatgatagagtcttactgcaaattgattctacaagagatggtaattcttcgattatatggggtgatttaggtattgccaatatcttagtaaaatctactgaccttgaggctatgaagtttgatgattacatgtattcatgggattgcagctaagagaatcataaaaatatattactttaataagtgtagtatctatagatcaatctagggagtgggacagaaatgatattttcgcaaaatttatttcgtcgtcccaccccaacttgcattgtctgtagaaattgagaatccaatttctctttgttggggcccatccccaacttgcattgcctgtagaatttcttttcgaaattctctgtgttggggcccctgactagaattgaaaaaagcttgttacaagcgcattttcgttcagtcaactactgccaatataacttcgtagagcatagaacattgatttatgtcccagcctgttttcataagccacagctaatgtgtatttaaaaataggaatacatgagtaaaactcatgcataagaaatactaatttctaaagaaaaagtatttctttatgttggggccccccaacttgcacattattgtaagctgactttccgccagcttctgtgttggggccccgctataattgaaaagtttgttataggtgtattttcttttggttaactattgttaatataacattgtagattttaggatgttgatttttgacttagcctttgtctgcttatgttaaatgttccagctagtcaaacattgagtttgtaattattatattaagctagtttaaattttttgtgatttatgttttattcataccaattttgtgaaatgatacagtgacagatgtttattgattttaaagggtgatgatgatggctattgtaaataaagtgataattgttgaaggaaaatctgataaaaaaagggtgcaacaggttattgcagaaccagtcaatattatttgtactcatggaacaatgagtatagataagcttgatgatatgatagaatcactgtatgataaacaagtttttgtattagccgattctgatgacgaaggagatcgaattagaaattggtttaaacgttatttgagtgaaagtgaacatatatttattgataaaacttactgtcaagttgcgaattgccccaaacaatatttggcgcatgtactttcaaaacatggctttacttgtaagaaagaaacacctcttttaccgaatataaataatgaaaggttagttttagtaaatgaataattcattagacatcaaagatgtaactacattttatgaggaagacaaacatttaatctttggttatacaccaacgtgtggtacttgtaaggtttcagaaagaatgttagacattgctaatgaaatattgcagttaccattattgaaaatagatttaaacttttatcctcagttttgtaaagatatgcaaatcatgtctacgccgattttattgttgatgaataaagataaagaagtaaaacgaatttatgcatttaaatcggtgactgatttgttagaaaatttaaaatagttattgacgaaattttactaaggtgttaggattaatacaaattaaatgatgcgtaaactcttatcgagagtggtggagggatgtgccctacgaagcccggcaaccgtcttatatagaaatggtgccaattcacataaagttttaacttttgaagatgagagaaacaatactactattgctttctcaatttttctatcgatattgagaaagcattttttattttattaagcaacacagggaggaatcaacgtgattgaattaaaagaagttgttaaagaatatcggactaaaaataaagaagtccttgctgtagatcacgttaatttatcgattcgagcaggatcgatttatggcgtcattggtttttctggagcaggaaaaagtactttgattcgaatgtttaatcatttagaagcgcctacatcaggtgaagttattatagatggagaccatataggtcaattgtccaaaaatggattaagagcaaaaagacaaaaagtaagtatgatcttccaacattttaatttgttatggtcaaggactgtgttaaaaaatattatgtttccgcttgaaattgcaggtgtccctagaaggagagctaagcaaaaagcattagaacttgtcgaactcgtcggtttaaaaggtagagaaaaggcttatccatcagagttatcaggtggacaaaagcaacgtgttgggattgcacgagcgttagctaatgatccaacggtcttgctttgtgatgaggcaacaagtgcacttgatccgcaaacaacagatgaaattttagatctactactaaaaattagagaacaacaaaatttaacaattgtactaattacgcatgaaatgcatgtcattcgtcgtatttgtgatgaagttgcagttatggaaagtggtaaagtgatagaacaaggaccggtgacacaggtttttgaaaatccgcaacacactgtgacaaaacgatttgtgaaagacgatttaaatgatgatttcgaaacatctttaacagaattagagccattagaaaaagatgcatatatcgttagattagttttcgctggttcaacaacaaccgagcctattgtatcgagtctatcaactgcctatgatattaaaattaatattttagaagcaaatattaaaaatacaaaaaatggaacagtcggctttttagttctgcatattccatatatttcaagtgtagatttcggaaaattcgaaaaagagttaattgagcgacaagttaaaatggaggtgttaagacatgggtaaatcatttagtgaaattataaatgaaatgattacaatgcctaatattcagtggccagaagtttggactgcaatagtcgaaacactatacatgacagtcgtctcaactatatttgcatttatacttggtcttattttaggtgtgttattattcttgtctgctaaaggtaagtctatcggtgcaaggttattttattctatcgtttctttcattgttaacttatttagagcgataccatttattattttaattttattattaattccatttacaagtttgatacttggaacgataagtggtccgacaggtgcgttaccagccttgatcattggcgcagcaccgttttatgcaaggctcgtagaaattgcttttaaagaaattgataaaggtgtcatcgaagcggcttggtcaatgggcgctaatacttggacagtaattcgtaaagtccttttacctgaagctatgccagcgctagtgtctggcattacagttacagcaatcgctttagttggttcaacagcagttgcaggtgtaattggtgccggtggtttaggaaatttagcatacttaacaggtttcactcgaaatcaaaatgatgtcattttagtatcaacagtttttattttaattattgtatttataatccaattcattggggattggcttacaaataaacttgataaacgataaattgggggtttcattttatgaaaaaattatttggtcttattttagtattaacatttgcagttgtattagcagcttgcggtaatggaaacaaaagtggcagtgacgacaagaaaataacagtaggtgcttcaccagcaccacatgctgaaattttagaaaaagcaaaaccattattagagaaaaaaggttatgaactagatattaaaacaattaacgattacactacacctaataaattactagacaaaggtgaaattgacgcaaactatttccaacatacaccatatttaaacacagagaaaaaggataaaggttacaaaatcgtaagtgccggtgatgttcacttagaacctatggctgtatactctaaaaagtataaaagtttaaaagaattaccaaaaggtgcaacagtctatgtgtctaataatccagctgaacaaggacgtttcttaaaattcttcgttgatgcaggtttaattaaagtcaaaaaaggcgtaaaaattgaagatgctaagtttagtgatattacagagaataaaaaagatattaagtttaataataaacaatcagcagaattcttacctaaaatttatcaaaatgaagacgctgatgctgttatcattaattcgaactttgcaatcgaacaaaaactaaatcctaaaaaagattctattgctgtagaaagtgcgaaagataatccttatgcaaacttaattgctgttaaagaaggacatcaagatgataagaaaatcaaagcattaattgaagtattacaatctaaagatattcaagacttcattaatgaaaaatacaatggtgcagttattcctgctaaataaatcatattaatggctcagtaacgtgatgttgctgggctttttaatttaaacaggtatttatatgatatttaggaatgagatgctattacggataaagtaaaatcctatatgcatgcgtgctactcatttattcttatttttaatttcacatggctagtgactaatacatcataaatcattagtgattctttattatttcagtcccactccctcaagttaatgatgaatctatttcgctagttataaaatgacgtcaaatcaatatcaaaaattatttaagtaaaatgtttagataatttttcagtgggtaagtattatatataacatttaattattccgaggaggcatttattatggcagacgaaagtaaatttgaacaagcaaaaggtaatgttaaagaaacagtaggtaatgttactgataataaaaatttagaaaacgaaggtaaagaagataaagcttctggtaaagcgaaagaattcgttgaaaatgcaaaagaaaaagcaactgattttattgataaagtaaaaggtaacaaaggcgagtaattttactttttattcctaatacactgcacatgccacttagtcggtataaccatcggctaggtggtttttgtattaaaaaagtggataccaaaatttattaataattattttaatgttagaaaaaaactaaataaaaactcgctaatgatatccaataatatgtatacaaaacgagacatatattgcatatgattaacgagatactgaaaatattttatcacccctaaaatgattattcattttcagcggtaattcgacctaaagtcaaacttacaataaaaccgatgataaatactactaatgaaacgaaccacatcacgatattagttggtaaacctggaaatactgcaaagagggagccaacaacaaaaccaatgattaatgcaaaagtcattagtttatgatgtgttaggaaatactggataattttgcttgaaataatgaatccagcaagcacgccaaatccgactgcaagtaatataggaagacctgcaaagttaagtttaacaacttcagatattgctagcatgaccgtaccatagaagccaaatactaataacataaatgaccctgaaatacctgggagtaacatagcactagatgcacacatacctgcaataaaatatttaataataagactagttgatagagtaagtgtttctccagcatgtttatcaccattattcattaatgtaataacaattaagatagcgataccagctataaccatcatgtaatgtttagttgtaaatgacgttttatagttagaaattttcaataaatatggaacgataccaatgattaatccaccaaagaaaaacatagttggaatatggtgttggcttaataaataattaaaaagattacttagtgatcccattgccagtaacattccaattataatggggattaaaaatgtaaaacttggccaaaaacgtcgtgagaatatgccgctaattgaagcgataaattgattgtaaatacctaacaataatgcgatagtcccaccgctaacaccaggtaccaagtcactcgttcccatagcaaaaccttttagaatattaatccatttaaattgttgcatgaataactcctttcaaacgattggaataaaatcataaatagcatcataccatattacaaatgtcctagtgaaatgataacatattttaaattcataaaatccattgagaaattatgtgcacttattatcatttatatttttaaagagagcggattagagttgtactttagagttattaaaaataataaaaagggtttaagttgtttatattaaggtataagtaagttataattaactgaacgcattattacaaagtctttttgactacaaattaaaattattataaactagttaagaaaactttatattttacggagggaatataaaatggcatcaacattagaaatcaaagacctacatgtgtctattgaggataaagaaatcttaaaaggtgttaacttgacaattaacactgatgaaatacatgcgattatgggaccaaacgggacaggtaaatcaactttatcatctgcaattatgggacacccaagctatgaagtaactaaaggagaagtacttttagacggtgtaaatattttagaattagaagttgatgaaagagcaaaagcaggattattcttggcaatgcaatatccatcagaaattacaggtgttacaaatgctgatttcatgcgttcagcaatcaatgcgaaacgtgaagaaggacaagaaatcaacttaatgcaatttattaagaaattagataaaaacatggattttctagacatagataaagacatggcacaacgttatttaaatgaaggtttctcaggtggagagaagaaacgtaacgaaatcttacaattaatgatgttagaacctaagtttgcaatcttagatgaaatcgattcagggttagacatcgatgcattaaaagttgtatctaaaggtattaaccaaatgcgtggggaaaactttggtgcattaatgattacacactatcaacgattattaaattacattactcctgataaagtacatgtaatgtatgctggtaaagtcgttaaatctggtggtccagaattagcaaaacgtcttgaagaagaaggatatgaatgggttaaagaagagttcggttcagctgaataatcttattaatacagtatccatgagatgttcatctatatatgatgaaaatgaacatttatacgaaatagtaaatttcatcaagtaggaggaaaaagttatgacaactgatattttgaacatttctgaagaacaacttgttgattattctaaagcccacaatgaaccttcttggatgacagaattacgtaaaaaagctttgaaattaacagaaactttagaaatgccaaaacctgataaaacaaaattaagaaaatgggattttgattcttttaaacaacacgatgtaaaaggtgatgtttatcaatctttatcacaattacctgagtcagtaagagaaattattgacgtagatcattctaaaaacttagtaattcaacataataatacgattgcgtacacacaagttgatgataatgcatcgaaagatggcgttatcgttgaaggtttagcagacgctcttatgaaccatagtgatttagtacaaaagtactttatgaaagatgcagtaacagtagatgaacatcgtatcacagcgctacacacggcattagttaatggtggcgtatttgtttatgttcctaaaaatgtagttgtagaacatccagtacaatacgttgtgttgcacgacgacgaaaatgcaagcttttataaccatgttatcatcgttactgaagaaagcgccgaagtcacatatgttgaaaattacttatcaaatgcatctggtgaaggaaatcaattaaatattatttctgaagtgattgctggtgcaaattcaaatatcacatatggctcagtggactatatggataaaggctttacaggtcatatcattcgacgtggtattactgaagcggatgcctcaattaattgggcactaggtttaatgaatgagggtagccaaattattgataatacaacaaatttatttggtgatcgttcaacaagttcacttaaatcagtagttataggtacaggcgaacaaaaaattaatctaacatctaaaatcgtacaatatggtaaagaaacagatggttatatccttaaacatggtgttatgaaagaacatgcatcgtctgtatttaatggtatcggctacattaagcatggtggaactaaatcaattgctaatcaggaatcacgtgtattaatgttatctgaacatgctcgtggtgacgcgaatcctattttattaattgatgaagatgatgtacaagctggtcatgctgcatcagtaggtcgtgttgatccagatcaactttactatttaatgagtcgtggtatttctcaaagagaagcggaacgtcttgttatacatggtttcttagatccagtagtacgtgaattacctatcgaagacgttaaacgtcaattgagagaagtaattgaacgcaaagtttctaaataatattttgaaaataaaagtttgtaatagatatagactgtcgatattggtataagactaatacaacgtcagtatttaaatgattaggatttttatttaagaaaggtcgtgaatgaagtggccgaacactcatttgacgttaatgaagtaatcaaggattttccgatattagatcaaaaagtcaatggcaaacgtttagcatatcttgattcaacagcgacaagtcaaacgcctgtgcaagtgttaaatgttttagaagattactacaagcgttataattcaaacgttcatcgtggtgttcatacattaggatcattggcaactgatggttatgaaaatgcccgtgaaaccgttcgtcgttttattaatgcgaagtattttgaagaaatcatttttacacgcggaacaactgcgtcgattaaccttgtagcacatagctatggtgatgcaaatgttgaagagggcgatgaaattgttgtcactgaaatggaacatcatgccaatattgttccttggcaacagttagcaaagcgtaaaaatgcgacattgaaatttataccaatgacagctgacggtgaattaaacatcgaggatattaagcaaacgattaatgataaaacaaagatcgttgctattgcacatatatctaatgtgctcggtacaattaatgatgttaaaaccattgcagaaatagctcatcaacatggtgcaattatcagtgttgatggggcgcaagcagcaccacatatgaaacttgatatgcaagaaatgaatgctgatttttatagttttagtggtcataaaatgcttggaccaacaggtattggcgtattatttggtaaacgtgagttactacaaaaaatggaaccgattgagttcggtggcgacatgattgattttgtaagtaagtatgatgcaacatgggctgatttacctactaaatttgaggcgggtactccattaattgctcaagcaattgggcttgcagaagctattcgctatttagaacgcataggttttgatgcaattcataaatatgaacaagaattaacgatatatgcttatgagcaaatgtctgcaattgaaggaattgaaatttatggcccgccaaaggatcgtcgtgcaggtgtaataacgtttaatttacaagatgtacatccacacgatgttgctacagccgtagatacagaaggtgtagcggttagagctgggcatcattgtgcgcaaccgttaatgaaatggttaaatgtgtcttcaacagctagagcgagtttttatatatacaacacgaaagaagacgttgatcagttaataaatgccttgaaacaaacgaaggagtttttctcttatgaattttaataatctagatcaattatatagatctgtcattatggatcattataaaaatcctagaaataaaggtgtattagataacgggtctatgacagtagatatgaataacccgacatgcggtgaccgtatacgactaacatttgatatagaagacggcattataaaagatgctaagtttgaaggtgaaggttgttcgatttcaatggcaagtgcatcgatgatgacacaagctgttaaaggtcattcacttggagaagcaatgcaaatgagccaagaatttacgaaaatgatgcttggtgaagactatgtgattacagaagaaatgggagatattgaagcattgcaaggtgtatctcaattcccagctcgtattaaatgtgccacattagcttggaaagcattggaaaaaggtactgttgctaaagaaggtaaagcagaaggtacgactgaagaagaatagaatgctgttaatcatagataattttgatattagacatataaaagtataaaaatttttataagatgtcatgtcattgttataatatggtttacatcatgaattaaaaacttacgcacgccgttgtaaatatatttttaaggagtgattgaaatggctaaaaaagcacctgatgttggggattataaatatggattccacgacgatgatgtgtccattttcagatcagaacgtggtttaactgagaatatcgttagagaaatttctaacatgaaaaatgagccggaatggatgttagatttccgtcttaaatcattaaaattgttttataaaatgccaatgcctcaatggggtggcgacttatcagaattgaatttcgatgacattacttactatgtaaagccttcagaacaagctgaacgttcatgggatgaagtgccagaagaaattaaaagaactttcgataaattaggaattcctgaagctgaacaaaaatatttagctggtgtttctgctcaatatgaatctgaagttgtttaccataatatggaaaaagaacttgaagaaaaaggtattatctttaaagatacagatagtgctttacaagaaaatgaagaattattcaaaaaatactttgcttctgtagtacctgcagcagataacaaatttgcggcgttaaactcagcagtatggtcaggtggttcgttcatttatgtacctaaaaatatcaaactagatacgccactacaagcttatttccgtattaactctgagaacatgggtcaatttgaacgtacattaatcattgctgatgaaggtgcttctgtacattacgtagaaggttgtactgcaccagtttatacaactagttctttacactctgctgttgtggaaatcattgtgcataaagatgcgcacgttcgttatactacgattcaaaactgggcgaacaatgtatacaatttagttacaaaacgtacttttgtttatgaaaacggaaatatggaatgggtagatggtaacttaggttctaagttaacgatgaaatatccaaactgtgttcttttaggtgaaggtgcaaaaggtagtacattatctattgcatttgctggtaaaggacaagttcaagatgccggtgctaaaatgattcataaagcacctaatacatcttctacaattgtttctaaatctatttctaaaaatggtggtaaagttatttatcgcggtattgttcattttggacgtaaagcaaaaggtgctcgttcaaatattgaatgtgatacattaatcttagataacgaatcaacatcagatacaattccatataacgaagtattcaacgatcaaatatcattagaacatgaagccaaggtttcaaaagtttctgaagaacaattattctatctaatgagtcgtggtatttctgaagaagaagcgacagaaatgattgttatgggattcatcgaaccatttacaaaagaacttccaatggaatacgcggtcgaaatgaaccgtttaatcaagttcgaaatggaaggtagtattggatagctttaaaccgcgttgttaagccattcttgacttccgaaaatggctattgataccattttgatactgaatataacaaaaagccacattactgtggctttttttgttttataactaaatcggattgatagataagctttgtacttatttatatcagttcgattttttgattggtgtaaaaaataatcattgatggtggataaagcgacaacacaaatacaacatgattgtggcattagagtgctggtctttattaaattaattgaaagctacatcaaatattctttagataattcgatattagttcgattaagattcgttgtataagtgagttaaaataagaaaactattaataatattaagttcactacagatgttgctaatggaccataagttttaaagacatcttcacttttataaccaacaatcgcatctaaaaattgaactaagatcattgcaatggatatagttatcaaaaatatagcactatgaatgactaaagaaaaaatagctaataaaaataaaggtaagcttcgactaagtgcataatatgcatttatattatggctagatgcacatgcttgaattgaataacctaaacttacactggcactgattattgtaaatattgctaaaacaaaatacatgttaatccttctttctatatttggatataaacaagtacttgtctaaagttatttaaaagataattagaataaatttatgagaaactggttgttatcattataatggtttcaaatgattataactatgtcataaactgaatttgttgaaatttttcattatgcaaatttaataataacaaacagctcgaactatagcatcattttactaatgaatgcattaaagtaactatgactaaaaatgcatattaattatcattattaagactattatatataatgaattttaactggtttattaaacgagaacgtcgggaattaagtaactacaataaaaataagatatgacaataaggagactacacgcgtgatcattgccataattatattgatatttatttcgtttttcttttcaggaagcgagacggcattaacggctgccaataaaacaaaatttaaaactgaagctgacaaaggtgataaaaaagcaaaaggcattgtaaagttacttgaaaaaccaagtgagtttattacaacgattctaattgggaataatgtcgcgaatattttattaccaacacttgttacaattatggctttacgttgggggattagcgttggtattgcatcagctgttttaacagttgttatcattttgatttccgaagtgattcccaagtctgtcgctgcaacatttccagataaaataacaaggcttgtatatccaattattaatatttgtgtcattgtgtttcgccctatcacattacttttaaataagttgacggacagtattaatcgaagtttatctaagggtcaacctcaagaacatcaattttcaaaagaagaatttaaaacaatgttagcaattgctggacatgaaggtgctttaaatgaaattgagacgagtaggttggaaggtgtcattaattttgaaaatttaaaagtaaaagatgtagatacaacacctagaattaatgtgacggcatttgcttcaaatgcgacatacgaagaagtttatgaaacggttatgaataagccatacactagatatccagtgtacgagggagatattgataacattattggagtgtttcattctaaatatctgttggcttggagtaataaaaaagaaaatcaaattacaaactattcagctaagccattatttgtgaatgaacacaataaagctgaatgggtattacgtaagatgactatttctagaaaacatttagcaattgtgttggacgaatttggtggtactgaagcgatagtgtcacatgaagacttaattgaagaattattaggtatggaaattgaagatgagatggataaaaaggaaaaagaaaaactttctcaacagcaaattcaatttcaacaacggaaaaatcgcaacgtatctatataaggagcgaacagctatgtggaataagaatcgacttactcaaatgttaagtattgaatatccaattatacaagcaggtatggcaggaagtacgacaccgaaattagttgcatcagtaagtaacagtggtgggttaggcacaataggcgcaggttactttaatacgcagcaattggaagatgaaatagattatgtacgccaattaacgtcaaattcttttggcgtaaatgtctttgtaccaagtcaacaatcatatactagtagtcaaattgaaaatatgaatgcatggttaaaaccttatcgacgcgcattacatttagaagagccggttgtaaaaattaccgaagaacaacaatttaagtgtcatattgatacgataattaaaaagcaagtgcctgtatgttgttttacttttggaattccaagcgaatctattataaaaagattgaaagaagcaaacattaagctaataggtacagcaacaagtgttgatgaagctattgcgaatgaaaaagcgggtatggatgctatcgttgctcaaggtagtgaagcaggtggacatcgtggttcatttttaaaacctaaaaatcaattacctatggttggaacaatatctttagtgccacaaattgtagatgtcgtttcaattccggtcattgccgctggtggaattatggacggtagaggagttttggcaagtattgtcttaggtgcagaaggggtacaaatgggcactgcatttttaacatcacaagatagtaatgcatcagaactactacgagacgcaattataaatagtaaagaaacagatacagtcgttacaaaagcgtttagtggaaagcttgcacgcggtatcaacaataggtttatcgaagaaatgtcccaatacgaaggcgacatcccagattatccaatacaaaatgagctaacaagtagcataagaaaagccgcggcaaacatcggcgacaaagagttaacacatatgtggagtggacaaagcccgcgactagcaacaacgcatcccgccaacaccatcgtgtccaatataatcaatcaaattaatcaaatcatgcaatataaataatcgaatcgaccgcaatccacaaaagcacaagcacccccaaacattattttagtgcttgccatttttgtggattgcgtttctattttaccaatctagtcaaacgaaattatcaaactaaagttcgctgaaatgattatgataaaagttatatggtatgatgacattggtgatatatatgataaacatcggattaacaggttggggtgatcactattcattatatgaagatttagaacgccaaaccgataaacttaaaacatatgctggacattttccggttgtcgaattagatgcgacatactatgcgatacaaccggaaagaaatatattgaaatggataaaagaaacgcctgatacatttgaatttgtggtcaaaattcatcaagcactcacattgcatgcagactacaaaacatttgcagatacaaggcaagaactatttgatcaatttaagaatatgttagagcccttacatacacagaaaaaattagcaatggtattggttcaatttccgccatggtttgactgcaatgcacaaaatatcaaatatattttgtatgtaagacagcaattacaagcatttccaatgtgtgtagaatttaggcatcaatcatggtttagtgatgcatttaaagaacaaacattggcatttttaacagaacatcaaatcattcatgcagtagttgatgaaccacaagtgaaagatggcagtgtacctttagtcaatcgaatcacaaatgaaattgcgtttgtacgttatcatggacgtaatcattacggttggactaagaaagatatgtcagatcaagaatggcgcgatgtacgctatttatatgattataatgagcaagaattaatagacttggcacaaaaggcacaaatattagcacaaaaagctaagaaagtttacgtcatatttaacaataattctggtggtcatgcagcaaataatgccaaaacatatcagcgattattgaatatagaatatgaagggttagcaccacaacaattaaaattattttaagaggcgacgactatgttattaacaattacattattagttttaatcggaggtttgtcagcgattatagggtctatcgtaggcattggaggcggtattattatcgttccaacaatggtttacctcggtgttgaacatggattactacataatattacaacacaagtagcgatagggacgtcttcagtcattctaattgtgacaggactttcttcatcacttggatatttaaaaacaaaacaagttgatattaaaaatggttccatctttttatttggactattaccaggttcattgcttgggtccttcattagtagatatttaacatttgagtcatttaatttatattttggtatctttttaattttcgtagccattttattaatggtaagaaataagattaaaccgtttaaaattttcgataaacccaagtatgaaaagacttatgtagacgctaaaggtaaaacatatcattatagtgttccaccattgtttgcttttattacaacgtttttaattggtatattgacaggtttatttggtattggaggtggcgcactaatgacgccactaatgcttattgtatttagatttccacctcatgtagctgttggaacaagtatgatgatgattttcttttcaagtgtcatgagttctatagggcacattgctcaaggtcacgtagcttggggttatgcaatcattttaattatttctagttattttggtgcgaaaatcggtgtcaaagtgaatcaatcaattaagtcagatacggtagtaacattattgagaacagtaatgttgttaatgggtatatatttaattattcgtgcgttgatttaatacaactttaaaaggaggacgtcaatttgaggcttacaatttatcatacgaacgatattcatagtcatttacatgaatacgaacgcattaaagcatatatggcagaacatcggccacgacttaatcatccttctttatatgttgatctaggtgatcatgtagatttatccgcacctataactgaagcaactttaggtaaaaagaatgtggcattactaaatgaagcaaaatgtgatgttgcaacaatcggtaataatgaagggatgaccatttcacacgaagctttaaatcacctttacgacgaagcaaaatttatagtgacatgtagcaatgttatagatgaatcaggtcatttaccaaataatatcgtttcttcttatattaaggacatagacggtgtgaaaatactattcgttgcagcgacagcaccttttaccccattttatcgtgcactaaattggattgttaccgatccacttgaatctataaaagaagaaattgaacttcaacgaggtaaatttgatgtattaatcgtgctaagtcattgtggcattttcttcgatgaaacattatgccaagaattgcctgaaattgatgtcatttttggtagtcatacgcatcattattttgaacatggtgaaatcaataatggtgtactgatggcggcagctggaaagtatggtaattatcttggagaggttaatttaacttttgaggcacataaagtagtacataaaactgcaaagattattcctttaaaaacattacctgaagttgaaacttcatttgaagaagaaggaaaaacgttaatgtccaattcagtaattcaacatccagtagtgcttaagcgtagtatgaatcacataactgaagctgcatacttattagctcaaagtgtttgtgagtatacacatgcacaatgtgccatcatcaatgctggcttactcgttaaagatattgtaaaagatgaagtgacagaatatgacattcatcaaatgttaccgcatccgattaatatggtaagggttagactttttggtgtgaaattaaaagagattatagctaaaagtaataaacaagaatatatgtatgaacatgcacaaggtttgggtttcagagggaatatatttggaggatatattctttataatttagggtacattcattctacagggcgttactatctgaatggagaagaaatcgaagacgacaaagaatatgtactaggtacgatagatatgtatacgttcggtcgttatttcccaacattgaaagaattaccaaaagagtatttaatgccagagtttttaagagatatatttaaagaaaaattattggaatattaaaaagtaagattattggattttcatttgtcatgaatttcgatataatgtttaaagatacacttaacaggagggtatgtgttgttatggcgacaaaaaacgaggaaatattacgtaaaccggattggttgaaaataaaattaaataccaacgaaaactatacaggacttaagaagatgatgagggaaaaaaatcttaatactgtatgtgaagaagctaaatgtcctaatatacatgaatgttggggtgcacgtcgtacagcgacatttatgattttaggtgccgtatgtacaagagcttgtcgtttttgtgcggttaagacaggtttacctaatgaacttgatttaaatgagcctgaacgtgtagctgaatcagttgaattaatgaatttgaaacacgttgttatcactgctgttgcgcgtgatgatttaagagatgctggttcaaatgtttatgctgagacagtacgtaaagttagagaaagaaatccatttacaacgattgaaattttaccatcagatatgggcggggactatgatgcgttagaaacattaatggcgtcaagacctgacattttaaaccataatattgaaactgttcgtcgcttaacaccgagagttcgtgcgcgtgcgacttacgacagaacattagagtttttacgtcgttcaaaagaattacaaccggatatcccaactaaatcaagtattatggttggattaggtgaaactatagaagaaatttatgaaacgatggatgatttacgtgcgaatgatgtagatattttaacgattggtcaatatttacaaccttcacgtaaacatttaaaggttcaaaaatattacacgcctttagagtttggtaaattaagaaaagtggcaatggataaagggtttaaacattgccaagctggacctttagtacgtagttcttatcatgcggatgagcaagtaaatgaagctgctaaagaaaagcaacgccaaggtgaggcacagttaaatagttaatatttaaccattaataaggcataaaggcttagtttgtacaaaacgaacgtgtcatagaagtaatcattatttttatgaaacactaaaagtataaactgagcctttcattgtcatagataggtgaagaatttgataaaagtagatcaacattactttgaattaatagaaaattatcgcgaatgttttaatgaagaacaatttattgctaggtattcagatattttagataaatatgattacatagttggtgactatggttacgatcaattacgattaaaaggtttttacaaagattctaataaaaaagcagagatgagtaaacgtttttcaaatattcaagattacatatttgaatattgtaactttggttgtccttactttgtattaagacatttgtctaaacaagaggttaaaaagttaatcgaagaagttcatccgtctgatgtgatagatgacgacaataaacttcaagatgtgaagattaagccaaccattcaagatactgaacattaataaaacccttagctagattgaaaatgggaatcatgcaattcaagcatggacctgtaatctagttaggggtttttatctttaatgaatgacttcatttaaatactcagtaatttcatcgccttcttcagcatttacacctaaaatatgagcgatatagccttcttcttttaaatcatcagtaccgataataccgaatttatttgtttgcatattaagtacgagtgtcttaccataatgtctatttgtatggactaacatcaaatcatatcgactatgctcgccaacaaaaccaacaaactgaacttgactctcttcgttgtcatcatataaatacatatcaatcattttgtagcgactccttttaaaagtagtaaagttagtataacgacaaatgaagtatactgcaaaattatgataatatataagtgagaggtgacaaggaatgtattttgtagacaaagataaactaactcagaaattagcctatttacaagcattaactgatgattatcatgagagcaagcacaatcattatgcatttgaacgcattgctcaaatgttgatagaatcatcggtagatatagggaatatgattatcgatgcatttattttaagggatcctggtaattataaagatgtgattgatatattagaactagaaaatgttattactaaagaaacacagcaggcgattaataaaactgtcggtattcgtaaacaatttacatatgattacacagccttagatattaagattatcatgccaatgtttgatgacgcattaccttattacaaacaatttattacagaagtaacgacatttttacatcaagaaaatgtaccagtaacagcttttggtaaaggagaaaatcaataatgaaacagtataaagcgtatttaatcgatttagatggcacaatgtatatgggaacagatgagattgatggagcaaaacaattcatcgattatttaaatgtaaaaggcattcctcatttatacgtaactaataattcaacaaaaacacctgagcaagtaactgaaaaattacgtgaaatgcacattgatgctaaaccagaagaggttgtaacgtcagcgttagccactgctgattatatttcagaacaatcaccaggagcatcagtatatatgttaggtgggagtggtttaaatactgcgttaaccgaagcgggacttgtcattaaaaatgacgagcatgttgattatgtagttattggacttgacgaacaagttacatatgaaaagcttgcgattgcaacgttaggtgtaagaaatggtgcaacatttatttctacaaatcctgatgtatcaattcctaaagagcgtggtttattacctggtaatggtgctattacaagtgttgtaagtgtatcgacaggtgtatcgccacaatttattggtaaaccagaaccgattattatggttaaagcattagaaattttaggattagataaatccgaagttgctatggtaggcgatctgtacgataccgatattatgtctggtattaacgtaggtatggatacgattcatgtacaaacaggtgtatctacgttagaagatgtgcaaaataaaaatgtgccaccaacgtattcttttaaagatttaaatgaagcaatagctgaattagaaaaatagatatagtcattttataaagtaggtgaattgatttggtaaaaatagttgtttcgaggaaaattccagataaattttatcaacaattaagtaaacttggtgacgttgttatgtggcaaaaatcattagtgcctatgcctaaagatcaatttgtgacagcacttcgtgacgcagatgcttgttttattacattaagtgaacagatcgatgcagaaattttagcgcaatcaccaaatttaaaagtaattgcgaatatggctgtaggatatgacaacatcgatgttgaaagtgcaacagcgaataacgtggttgtcacgaatacaccaaatgtacttactgaaacaactgcagaattaggatttacattaatgcttgctatagcacgccgtattgtagaagctgaaaaatatgtagaagcagatgcatggcaaagctggggtccttatttattgtcaggtaaagatgtcttcaattcaactattggaatatatggtatgggagatattggtaaagcttttgcaagaaggttgcaagggtttaatactaatattctttatcataatcaatcaagacataaagatgcagaggcggactttaatgcaacatatgtttcttttgaaacgttgttagcagaaagtgattttatcatctgtacagcgccacttacaaaagaaacacatcataaatttaatgctgaagcatttgaacaaatgaaaaatgatgcaatttttattaatatcggtagaggacaaattgtagatgaaacagcattaatcgatgcactagacaataaagaaattttagcatgtggtttagatgtattagcaaatgaaccgattgatcatacacatccattaatgggacgtgataatgttctgattacaccacacattggtagcgcatcagtaacaacacgggacaatatgattcaattatgtattaataatatagaagcggttatgacaaatcaggtaccacatactccagtaaattgaaaataagtatggtttttaatcattggtaaaacaagcaaagcaattgttaaatatgttatgcttgacttgcgaatgtatatatttgcgctgatgataattcaataacattataaactcgtcatattaatgtgatgagtttatttgattttgacgtatataacaaaattgttatatagactgtaattgtttattgtttaaataacctttaaaatgaatgatgttctcaacaaagtgtatcatttacaataattgagtgatgacaaccaattactatgttgaatctataaaattaaaattgaatttcattatgaatatcgatataatgaattgtaaaaaacaaattttaaaacgtattttatattgaacggtctttataaaggcgtttttactaagaactttaagaggtgcaatatgaaatctaaaagtaaacagccacctaataaatatgttgaagcattcaaaccatatttattaacactattgtatttggcaatatttattactttatatttaatttatggcagtggcgacacacacaataacttcatttataatgagttctaatgagggagacttaatatgacagatattattaacaagctgcaagcgtttgcggatgcaaatccacaaagcattgctgttagacacacaactgatgaattaacttatcaacagttaatggatgagtctagtaaattagcacatcgattacaaggtagtaagaaaccgatgattttattcggtcacatgtcaccatatatgattgttgggatgattggtgccattaaagcaggatgtggatatgtacctgtagacacttcaattcctgaagaccgtattaaaatgattattaacaaggttcaaccagagtttgtatttaatacgactgatgaatcatttgaaagtttagaaggcgaagtatttacaatagaagatattaaaacatctcaagacccagtaatttttgatagtcagattaaagataacgacacagtatacacaatctttacatctggttctactggggaacctaaaggtgttcaaattgaatatgcaagtttagttcaatttactgagtggatgttagaacttaataaatcaggaaatgaacaacaatggcttaaccaagcgccattttcatttgatttatctgtaatggctatttatccatgtttagcatcaggcggtacattaaatcttgtagataaaaacatgattaataaacctaaattattaaatgaaatgctaacagcaacaccgattaacatttgggtatcaacaccatcatttatggaaatgtgtttattattaccaacgcttaatgaagaacaatatggtagtcttaacgaattcttcttctgtggtgaaattctacctcacagagcagcaaaagcgttagtaaaccgtttcccaagtgcgacgatttacaacacatatggtccaactgaagctacggtagcagttacaagtattcaaattacacaagaaatcttagatcaatatccgacattacctgttggcgttgaaagaccaggcgcaagattatctactacagatgaaggtgaacttgttatcgaaggtcaaagtgtaagtttaggatacttaaaaaatgaccaaaaaacagctgaagtatttaatttcgatgacggtattcgtacatatcacactggtgataaagcgaagtttgaaaatggtcaatggttcattcaaggtcgtattgatttccaaatcaaattgaatggctacagaatggaattagaagaaattgaaacacaattacgccagtctgagttcgtaaaagaagcgattgttgtacctgtatataaaaatgataaagttattcatttaattggtgcaattgtgccaacgactgaagttacggacaatgcagaaatgactaaaaatattaaaaatgacttgaaatcacgcttaccagagtatatgattcctagaaagtttgaatggatggaacaattgccattgacttcaaatggtaaaattgacagaaagaaaattgcagaggtaattaacggatgattccatatggtgattttacattcttcttaattgctttaattgcattattaccagtcattatacttggatttttaggtaagcgaagttacatttataatggcgtagttacagcatttatgattgtgttaatcttttcttctgataaacataatctgtttgaccaaaagtatttaagtgttcaattaattagttttattatttacgtcgtatggcaagttttattgataatgttttattatcattcaaaaccaaaaaataattcattttcaaaatttgtaactgtaatggttttatcaatattgccattagcacttgtgaaagtgttacaaagtacatggttaggtggacatcagattcacttccatgaaagtaaattaattgaatttgttggtttcttaggaatttcttatgttacattcaaaagtgtgcagttaattatggaaattcgtgatggttctatcaaagaaattaaagtatggaaattaattcaatttatttcattcttcccaacgatttcatctggaccaatcgatcgttacaaacgtttcgttaaagacgataaaaaagtaccaacaggcaatgaatatcgtgaattagtattaaaagcaattcacatgattatgcttggtttcttgtataaatatattgttgcttactttattaacacatatgcaatcatgccgttacaattagacttacatggctttgtcaatttgtggttatatatgtacgcatacagcttatatttattctttgactttgcaggttatagtttatttgcgatagcatttagttatttattcggtattaaaacaccaccaaacttcgataaacctttcaaagcgaaaaatattaaagatttctggaatagatggcatatgacattatcattctggttcagagattgtatttacatgagatctttattctacatgtctcgtaaaaaattattgaagagtcaatttgcaatgtctaacgtggcattcttaatcaacttcttcataatgggaatttggcatggtatcgaagtgtattacattgtttatggtttataccatgcagcattgtttataggttatggctattatgaacgttggcgtaagaaacatccgccacgttggcaaaatggtttcacaacagcacttagcattgtgattacattccactttgtaacatttggctttttaatcttctcaggtaaacttatataataaaggagaatttaattatggaatttagagaacaagtattaaatttattagcagaagtagcagaaaatgatattgtaaaagaaaatccagacgtagaaatttttgaagaaggtattattgattctttccaaacagttggattattattagagattcaaaataaacttgatatcgaagtatctattatggactttgatagagatgagtgggcaacaccaaataaaatcgttgaagcattagaagagttacgatgaaattaaaaccttttttacccattttaattagtggagcggtattcattgtctttctattattacctgctagttggtttacaggattagtaaatgaaaagactgtagaagataatagaacttcattgacagatcaagtactaaaaggcacactcattcaagataagttatacgaatcaaacaagtattatcctatatacggctctagtgaattaggtaaagatgacccatttaatcctgcaattgcattaaataagcataacgccaacaaaaaagcattcttattaggtgctggtggttctacagacttaattaacgcagttgaacttgcatcacagtatgataaattaaaaggtaagaaattaacatttattatttcaccacaatggtttacaaaccatggtttaacgaatcaaaactttgatgctcgtatgtctcaaactcaaattaatcaaatgttccagcagaaaaacatgtctactgaattaaaacgtcgttatgcacaacgtttattacagtttccacatgtacacaataaagaatacttgaaatcttatgctaaaaaccctaaagaaactaaagatagttatatttctggttttaaagagaatcaattgattaaaatagaagcgattaaatcattgtttgcaatggataaatctccattagaacatgttaaacctgctacaaaaccagacgcttcttgggatgagatgaaacaaaaagcagttgaaattggtaaagctgatactacatcgaataaatttggtattagagatcaatactggaaattaattcaagaaagtaagcgtaaagttagacgtgactacgaattcaatgttaattctccagaattccaagatttagaattacttgtaaaaacaatgcgtgctgctggtgcagatgttcaatatgtaagtattccatcaaacggtgtatggtatgaccacattggtatcgataaagaacgtcgtcaagcagtttataaaaaaatccattctactgttgtagataatggtggtaaaatttacgatatgactgataaagattatgaaaaatatgttatcagtgatgccgtacacatcggttggaaaggttgggtttatatggatgagcaaattgcgaaacatatgaaaggtgaaccacaacctgaagtagataaacctaaaaattaaaatacaaatagcacataactcaacgattttgattgagcgtatgtgctatttttatattttaaatttcatagaatagaatagtaatatgtgcttggatatgtggcaataataaaataattaatcagataaatagtataaaataactttcccatcagtccaatttgacagcgaaaaaagacaggtaataactgattataaataattcagtattcctgtctttgttgttattcataatatgttctgttaacttaatatctttatattagaatacttgttctacttctattacaccaggcacttcttcgtgtaatgcacgctcaataccagctttaagagtgattgtagaacttgggcatgtaccacatgcaccatgtaattgtaatttaacaataccgtcttccacgtcaatcaatgagcagtcgccaccatcacgtaataaaaatggacgaagacgttcaataacttctgctacttgatcaaacatcgttgtatcttcagtaggcatcaggcaagtctcctttcgagagatgaatttgataatctttattagtatattataatagatagtgtaataaaaatctatcaaaccaatgggggataaatatatggagcacgtgagtgtggtagtatatggggcagatgttatatgtgcaagttgcgttaatgcgccaacatcgaaagatatttatgactggctacagccgctattaaaaagaaaatacccaaatatatcatttaaatatacgtatatagatattacaaaagataatgacaacttaacagatcatgatttacaatttattgaaagaatagaacaagatgaactattttatccattaattacaatgaacgatgaatatgtagcagatggttatatacaaacaaagcaaatcactcgatttatagaccaaaagcttgtgaatgaataatatacacataactaaaagcaatgtcagtaatagtgtgaactgacattgctttttaattttaaccattatgatatttatataaccaaagtacgccggattttaaaatagaagcgagtcgtcctgttacagtgcggtccatgatatatgcaaaaccttgcttatctcctaatgacccaacgataccttgtacctttagttccggcattttgtcaggtaatggttcatttagccattgctttttaagcacatcggcaatttgatcaccttgaacttcggctaactgagcacttggcgcatgtggtaaatcagcacaatcaccaactacatagacgttacgatatgttggtacttgatgatactggttaactatcacgcgtccattactatttatatcaatcggcaagttacgaacaacttcaacaggttgaattcctgctgtccatacaactaaatcaatatctttaggttcatcacagttatatattttaccaggttcaactttattaatatttgaatttggaacaacggtaacattatttttggcgaaccatttcgcaacatacttacttaatttttctggaaaatttcttaaaattcgcggcccacggtcataaagatatatttccaagtctgatctactttctcttaattcgctggcaagttctatgccgcttaatccagcaccaacgataccgactttagcaccttctggtagttcactaatactatggaaagtatcccgagcctttgagagtgtttgaatactatgtgtatattcttcggctcctggaacgttatgatatttatcttcacatcctaaaccaatgattagctcatcataatcaattttagaattaccgactgagacaatttgagcatctaaatctatgtcgttaatttcaccataaactgtattcacttgtggatgattagggaatttcatacgaacatctttatctgatttcgtgcccgcagctaaagcataaaattctggtttcaatccatgaaatggcatacgatcaactaatgtgactgtataatcttgtggtaaagaagtagttaaaatgcgtgacatgatacgcatattaccatatccgccgcctaacaaaactaagtttttcataatgaagtaccccttttatatgttaatatttactttaattttgaaaagatcaaagtgcatagatatatttgttaatgaacagttataaaatgcaagtgtctttgattcatcaataacccctaaaaaagtaaatatgtatttatatgcttattatatatttttttgaaaatgactacaaataaatatttgtactaactaaggcactattacataactgggataagaaacatcagttgttgctaattgagcacatcatgttaaaataccagttttaaaatgctataatattgtaacaaatgaaataagaaggtgaagtatgaatccgatcgtagaattttgtctctctaacatggcaaaaggtggagattatgtttttaatcaactggaaaatgacccagatgtcgatgtgttagagtatggttgcctgacacattgtggtatatgttcagccgggttgtatgctttagtaaatggtgatattgttgaaggtgattcgccggaagaattattacaaaatatatatgcacatataaaagaaacttggattttttaaggaggagttatcatgccaacagttatattaacagaagcagctgcttacgaagtaaaagatatgcttaaagcaaatgaaatgccagatggctatttaaaaattaaagtgaatggtggcgggtgcactggtttaacatacggtatgggtgcagaagaagcgcctggtgaaaatgatgaagtcttagaatactttggattaaaagtattagtagacaaaaaagatgcacccgtattaaatggtacgactattgattttaagcaatcattaatgggtggcggtttccaaatcgacaatcctaatgcaattgcttcatgtggctgtggtagttcatttagaactgcaaaagttgcaggtaatcctgaaaattgctaataaaataactttttaatggttaacccaatttttgggatacaaattgatatcaataacgattaaggacatatttgattatgtcctatttttgcgtaaagatattttgttttattaaaaagcttattgaaaattaagaatctgactataaatagtattttaaatgatcgtgatagcggatacatttttaatcgaaatcaggctacgaaaaaattaattaattttttcacaatctgactgaatcttgcttgaaaatataacataaaagctatagaattagtattggattaaaaatgtcttttttgtgaacatcacaggtttttacataatttaaaagacttaaataacaaaatgatgataaactagtatacattgtggtaaaagtagtaatgaccagttgttactagtaattatcagcatttggttaaaaaaatatgaaagcttaggtgaaattaaatggctcaagatcgtaaaaaagtacttgtacttggtgctggttatgcaggtttacaaactgtaactaaattgcaaaaagcgatatcaacagaagaagcagaaattacgcttattaataaaaatgaatatcactatgaagcaacatggttacatgaagcatcagcaggtacactaaactatgaagatgtattatatcctgtggaaagtgtcttgaagaaagacaaagtgaactttgttcaagcagaagtaacaaaaattgaccgtgatgctaaaaaggtagaaacaaatcaaggtatttatgactttgatattttagtagtagcattaggtttcgttagtgaaacattcggcatcgaaggtatgaaagatcatgctttccaaattgaaaatgttatcacagcacgtgaattatcacgtcatatcgaagacaaatttgctaactatgcagcatcaaaagaaaaagatgataacgatttatctatcttagttggtggtgctggattcactggtgttgaattcttaggtgaattaacagacagaattcctgaattatgtagcaaatatggtgtggatcaaaataaagttaaaatcacttgtgttgaagcagcacctaaaatgttaccaatgttctcagaagaattagttaaccacgcagttagctacttagaagaccgcggtgttgaatttaaaattgctacaccaatcgttgcttgtaacgaaaaaggttttgtagttgaagtagatggtgaaaaacaacaattaaatgcaggtacttcagtatgggcagctggtgtacgtggtagtaaattaatggaagaatcatttgaaggcgttaaacgtggacgtatcgttacaaagcaagatttaacaatcaatggttacgacaacatttttgttattggtgactgttcagcgtttatcccagctggagaagaacgtccattaccaactacagcacaaattgcaatgcaacaaggtgaaagtgttgctaaaaacattaaacgcatcttaaacggtgaatcaactgaagaattcgaatacgttgatcgtggaactgtttgttctttaggttcacatgacggtgtaggtatggtatttgataaacctatcgctggtaaaaaagcagcattcatgaaaaaagtgattgatacacgtgcggtattcaaaatcggtggtatcggtttagcattcaaaaaaggtaaattctaggctttaaataaagtttcagctaaacacataaaattaaattattcatttataaagtccttcagtgtcactgaagggctttattgttgtacaatttgaagtgagtaacatatcaaatctaaggaggtacattatgaattttaaattaaataacacactaagcaacgaaataaatacattgattattggtataccagaacatttaaatcagttagagcgcattagttttaatcatatcgatattacagaatcacttgaaagactaaaacatcaacatattattggtagtaaagttgggaagatttatacaactgcatttgatgtacaagatcaaacatatcgtttaattacagttggtttaggaaacttaaagacacgtagttatcaagatatgttgaaaatatggggacatcttttccaatacataaagtcagaacacattgaagatacgtatttacttatggattcatttatttcaaaatatgatcagttatcagatgtattaatggcatgcggtattcaaagtgagcgtgcaacatatgaattcgatcattataaatcaagtaagaaggcaccgtttaagacgaatttaaaccttattagtgaatcattaattgaattagattttattcatgagggtatcagtattggccaatccattaatttggcaagagactttagtaatatgccaccgaatgtattaacaccacaaacatttgcagaagatattgttaatcattttaaaaatacaaaggtcaaagtagatgttaaagattatgacactttagtttctgaaggattcggacttttacaagcagtaggtaaaggtagtaagcataaaccgagattagtaaccatcacatataatggcaaagacaaagatgaagcaccaattgccttagttggtaaaggtataacgtatgattctggtggttatagtattaaaacgaagaatggcatggctacaatgaagtttgacatgtgtggcgctgcgaatgtcgttggtatcattgaagcggctagtcgtttacaactgcctgtaaatattgtcggagtgcttgcgtgtgctgaaaatatgataaatgaagcatcaatgaagccagatgatgtatttacagcattaagtggtgaaactgtagaagtaatgaatacagacgctgaaggtagattagtccttgcagatgctgtgttttatgcaaatcaatatcagcctagtgtgattatggactttgctacattaacgggtgcagcaattgttgcactaggcgatgataaagctgctgcatttgaatcgaatagtaaagtgatattaaacgatatattacaaataagttctgaagtcgatgaaatggtatttgaattaccgattactgcaaccgaacgtgcaagtattaaacacagtgatatcgctgatttagttaaccatacgaatggacaaggtaaagcgctatttgcggcaagttttgtaacacattttagtggtcaaacacctcacattcatttcgatattgcaggtccagcaacgactaataaagcttcatataatggtccaaaagggccaacaggatttatgattccgacgatagtacaatggttaaaacaacaataatttaattatttgcctgatacaacttgtgtcttgatatacatttctaatttaactcttgaaagtataaaggatcgcattgtatcaggcattttcattgttgtaagaaaatataaatcgcatatccttgtgagcataaatcaacttgactagcattgcaaaaaaatattataagcatatgttcattcagtcaacgactactaatattgcattttagaacttaggattttgattggtgttccaagcttgtaaaattgtttaatttaatgaaagctaaaattattttaagaaagacaattaactaaaaaataaagattattggtatagtttgctattgacaggtgttaaagctactgatactatgtagtctataaacgctttagttcgatagagtgataaaggatggttgtcatatgataaatgcagtagtaatagcagtaattttaatgattgtgctatgtttatgtcgattaaacgtagttataagcttatttatcagtgcgctagttggtggcttaatttcaggcatgagcattgaaaaagttataaatgtatttgggaaaaatatagtcgatggtgctgaggtagcattaagctatgctttattaggtggatttgcagcattaatttcatacagtggtatcacagactatttagtaggaaaaattataaatgcaattcacgctgaaaatagtcgatggtcaagagttaaagtcaaagtgacaataatcattgcattattagctatgagtatcatgagtcaaaacttaattcctgtacatattgcattcattccaattgtcatcccaccattgttaagtctgtttaatgacttaaaaatagatagacgtttaatcggtttgattatcggttttggtttatgtttcccgtatgtgttattaccatatggattcggtcaaattttccagcaaattattcaaagtggctttgcaaaggcgaatcacccaattgagtttaatatgatttggaaagcaatgcttattccttcaatggggtatattgttggcttacttatcggtttatatgtatatcgtaaaccacgtgaatatgaaacacgtaaaatttcagatagtgacaatgttacagagttaaaaccatatatcttaatagtaacaattgtagcaatactagctacatttttagtacaaacatttacagattcaatgatttttggtgcactggcaggggtactcgtattctttatttcacgtgcatataattggtatgaattagatgctaagtttgttgaaggtattaaaattatggcttatattggtgtagttattttaacagcaaatggatttgctggtgtaatgaatgctactggtgatatagatgaattagttaaaactttaacaagtattactggtgataataaattatttagcattatcatgatgtatgtgataggtttaattgtcactttaggtattggatcatcatttgcaacaattcctattatcgcatcattattcattccttttggagcgtcaattggactagatacaatggcattaatcgcattgattggaacagcgagtgcattaggtgactcaggttcacctgcaagtgattcaacattaggaccaactgcgggattaaatgttgatggccaacatgatcatatacgcgatacatgtgtaccaaacttcttgttttataatattcctttaatgattttcggtactattgctgctatggtactataagcataaagaggtgaaaatatgactcatttattagagacatttgagatgtcaatagatcaccaggaagatggtttagttgttatttctatgcctgttactgataaagtaaaacaaccatttggatatttacatggtggtgcttcgattgctttaggtgaaacagcatgttcattaggatctgctaatctaattgatacaaccaaatttattccattaggtttagagatgaatgccaatcatattcattctgctaaagatggtcatgttactgcgacagctgaaattattcatcaaggtaagtcgacacatgtatgggatataaaaattaagaatgacaaagaacaattaattacagttatgcgtggtacagttgctattaagcctttaaaataaaagaactgctagctgaaatgttatgagatattcataactacggctagcagtttttttatgcgctatattgttgtaattttagaaatgcttgttcaatgcgttcggcagctttacggccacccataacatttctaccaaatggtcctaattctaagtctgcaaagcatcctgcgacaaatagatttggtatccattctaatttttcggaaataacagggtaattacattcgttgataggtgcatcataattttgtattaattgcttaataagtggttgtgacataaaatcttgttcaaaaccagttgcaaccataatctgttgatatggaacagaattattttcagtgttaattaaaccatcactaatttgagtgataggtgttttatgcacatttatacgaccatttttaatatgttttttaaggcgtaagtacagttcgtgaggcattgatcctttatgacgttcacgttgtacaatggcatttctttcaggcatgcttttagtacttaaaaatgtagacatattcttcggacctaaccaaccaggatcagcatcaaagtcatgtatttcaatatctttatttagccataaatgaatctttttatcgttatcatgatttaacaatttaagtgcaagatgtgcagccgtaatgccactaccaacgatatgatcggtcttatcatatactacttgatcatgttctttctcgaagatatgatttacattctgtttgtcttttaaaatgtcaggcataaacggaatatttgtactacctattgcaataacgacgcaatctgtagtgataatttgtccatcttctaacttgatatgccatttgtcttcttgtttatctaaagtttgaactaaaccttgaaccaagcaatcctctaattgatattgtttagaagcatgtgcaatatgatccataaacattgtcaattcaggtcgttgataaggaccataaaaagcatttgtatattggtgctgtttagcgaattgttttagatggaacggttgtggatgtacgtgatgtacaatcggtgatcttaaataaggcatttctattcgatttgtaaatgagttaaacctttggcaaaaagtttcgtgtgggtcaatgattgttaatcggtctgttgttaatccgcttgataatagtttttgtgcgattgcagttccctgtatgccaccgccgataattgtccaatgcataataaaacctctctctttttaaagcgtaatcgttacgatttataattattattatcataatacataacgacatgaaaggcaattaaattaaagagatatatgtagatagggcgaagctgtagtcaaagaaaaaaccattgaaaaagaggtaacaatgtcaaaagaaaacagcagtaaaatcattcctaatttggaatcatcttactgctgtttgttgttgatttatattcatgattttgttatataatctacaattttgtgtcttttaagtcttctgaaatttcatcgactttagtctttttagtataaggcgttttaatattatatgctgctttcataatcatatgacttgaaagaggacctgtaattaatacaaagataatcgcaacgattaattgcatatttacaaaaccttgagtagcaataaaatataaaaacgtaccaaatagtaatgacattgcacctaatgttgatgcttttccggcagcatgtgcacgtgaatatacatcttcaagtctcaataatcctatagctgccagggcgctaattaaagcaccgatgataacaaagataagtgcaagactaatcagtatgattttgatcatgttcaatcaccttacctttgtccataaatttagagaatactgcagtacctaaaaaagctaatataccaatcatcataataacgacaatcatgtatttaatatttaataaaatactgaataatgctataactgccattaattgaagaccaatcgcatctaatgcgacaacacgatcggcaagtgatgggcctagcacaacgcgaatgagcatagctaacatagaaatgacaactatgattaatgcaataacgataataacattatgattcattatatttcgcccacctctcttacaattttctctaatgatgttttaatactttctacttcttgctctttagttgaaaaatctatggcatgaatataaatttttgtacgatcgtcacttacaccaagcactacagtaccaggtgttaatgtaattaaattagacagcaagacaatttgccaatctttttttaaatctgtgtgataaacaaagaatcctggttcatttttaatcgaaggtttaataataattttcaaaacatcaaaattagctttaatcagttcgattaagaaaataataactaatttaataatacgatatagcgtgatgacataaaatctacctggtaacactctgtgtaagaggtaaacaagaactaggccaaagatgaaacctaacacaaagttatttgttgtgtaactatttgtcacaaacaaccaaaacactgcgataataaagtttaatactaattgtacagccatgttatttacctcctaatacagctttaacgtaggttgatggattgtagaatgtttctgcaccagcttttaccattggatataagtaatctgctgacaatccatataaaacagttatcacaactgcaacgattgcaatcgtagttaaatatttgacgtcgactttgttattaagatcatatccttttggttgaccgaaaaagccttgtaggaatatgcgaatgacagaatataatacgactaaacttgataataagacgatgacaccacttaaataaaatcctctttcaaatgttgattggacaataaaaaattttccataaaagccactgagtgggggaatgccagctaaacttaatgctgcgataaagaatgaccaaccaagtacaggatatcgtttaattaagccaccaaattgtcttaaatcagcagtgcctgtaattttaatcataattccgataagcaagaataatgcaagttttactaacatgtcgtgcaatgtatagtaaatagccccaatcatacctgactctgtcatcattgcaacgccgactaagatcacacctacagcaatcatgacattgtataggatgatttttttaatgttggcatatgcaacagcaccgacacaaccaaagatgatcgttaatagtgctaagaataaaatgacataatgtgaaaagcttacattatcactaaagaataggctcaatgttctagcgattgcataaacaccaacttttgttaacaaagcaccaaagaatgcaatgattggaattggtggtgcatagtatgcactaggtaaccaaacaaacattgggaatacgccagcttttgtagcaaaaacaaagataaatagtatgaaaacgatattgactaagccactgtcatgcgctgaaaggttagctaatttattgcttatatctgctagattcaatgttcctactactgaatataaaatcgctacacccattacgaagaaggatgacgatacaacgttaacaagaacatattttattgtttcttgtagttgaatttttgtagaaccaattactaataagaaataagatgacattaaaaatacttcgaaaaatacgaataggttgaaaatgtcaccagttgtgaatgcaccaatgatacctattaacataaatagtactgaaaaataataataatatctttcacgttcaataccaattgtttggtatgaatataaaatcacaatagctgtaataataatactagtaattattagtagggcactgaatatgtctaatacaaagacaatactgtatggtgctttccatgaacctagctctacgcgtattggtccatgtttaacaacatttgctaaattgataattgccgcgaccaaggttaataatgtaccgcctagtgcgacataacgctttataataggacgctttccaataaagacaagtaatatggctgtaattactggaataactagcgttaacacaagcatattactttcaatcatcttctggaactcctttcatactctcaacgttatctgtgcctaattctttatatgttctaaatgctaatactaagaaaaaggctgttgtcgcaaaggcgataacgattgctgttaaaataagtgcttgcgggataggatcaacatagctttttacgttcgcttcataaattggaacagtaccatgtttaagtccgcccatagttattaaaaataaatttgctgcatgtgttaatagtgtagttcccataacaattcgtatcagacttttagacaaaacgagatagacactaattgctgtgagaataccactaacaaaaatcataataatttccactattcgttctctccaatcgaaataataattgtcatgacagtaccaactactgcacataaaacaccgaaatcaaagaatactgctgttgtcatatgaacaggttctaatataaataacggtatatcaaatgtgacatgcgtaaagaaatttttgcctaaaaaccaacttgcgataggcgtcgcaatacaaaaaactaatccgatacctatcaagattttaaaatctaatgggaaaattttacgcattgtttctatatcaaatgcaatcgtaatgataacaagtgaacttgcgaataataatccgccgacgaaaccgccaccaggtgtataatgtcctgctaagaaaagtgaaaaaccaaagaccattaccatgaaaaagataataactgcagcaaattgcaaaattagatcattttgttgtctattcatgatttttcacctcgttaccttgcgtttgacgctttttacgtaatttaatcattgtatatacagctaatcctgcgataccaagcacagatgactcgaataaagtatccataccacggaaatcaacaagtatgacgtttaccatgtttttaccgtgagctaaatcataaacgtgctcttgataaaacttagatatcgattcaaaatgtctatttccgtatgcaattaaaccgataataatgacggacaaaccaacaccaccagcaattaaagcattagtaagctggaatgagcgcttttcattataacgatttaaatttggtaagtggtagaagcataataagaacaatgctgttgaaatagattcaacgacaaactgtgtcaatgctaagtcgggtgctttaaagaatataaacaatacagacacagcatatccaactgcacttaacataatgatgctaaataatcttgatttagcgaaaagaattaaaaaggcagcacttaataataaaattacgatacaaacttcgaaaattctaatcggactaacgtctttaaaattaatgttgaaaggtactgagaatatagtgacaaatgttaataaaattaatgcaccaaaaatgataactaaattattacgtgaataatcggtaacatagctattcgtcatcttttcagagtagtttggaataacatttgcacttctgttgtaccaataattgaatgttagtttaccaggttgtcgttgcaacaatttcacccaataactaaatgtcacaattagtaagatacctaaaatataaatcactaatgttgataaaaaggcaggcgttaatccatggaacatatggaattcaacatcatcaattaccgtatgattaatcgaagatgtagctggttcaataatcgaattagttaaaatgccagggaataaaccaaatacaattactaatgtagctaaaatagctggtgataaaagcattaatattgatacttcgtgtgcttttttaggtaattgttcaggtttatattgtccgaaaaatatatgcattataaatttaattgaatatacaaatgtgaagacactgcccactataccaatgattgggaataggtagcctaatgtatcaacactgaataaatttgcttggcttgctgtaaatgttgtttctaaaaatgattcttttgataagaaaccattgaacggtggtacaccagccatacttaatgctgtaataacagtgattgtaaatgaaataggcataattgttagtaagccacctaatttcttaacatcacgtgtaccagtagaatgatccactgcacctgtaatcataaatagggcacctttaaatgttgcatggttgattaaatggaatattgcagccgtaaatgcagcagcatatattttgctatcatcgccttgatagtgataactaatggcaccgattccaagcatcgccataatcatacctaattgggatactgttgaaaatgccagtatacctttcaagtcttgttgttttgttgcgtttagcgaagcccagaataatgtaattaaaccaacgagtgtgacagtccatacccaaccttgcgatgctgcgaagattggtgtcattcgagcgattaaatataaccctgctttaaccattgttgctgaatgaagataagcactgactggtgtaggtgcttccattgcatctggtagccaaatataaaatggaaactgagcagattttgtaaaagcaccaatcatgattaaaatcatcgcaaaaatgaagaatgggctattttgaatttcagaagcatgttgaatcatgtactgaatgctaaatgattgtgttggtatagcgagtaagatgataccacctaataatgatagaccaccaaatactgtgattatgagcgatttttgagcaccatatatagatgcttgtcgttcgcgccagaatgaaataagtaaaaaactagaaaatgacgttagctcccagaataaatatagaataataacattatctgaaagtacgacacctaacattgcacccataaatagtaataaataacaataaaaattccctagttgttctgacttacttaagtagccgattgaatataatactactaaactgccgattcctgaaataagcaaactaaagagtaaacctaagccatcaagatataaatcaaagttcataccaaaatgaggcatccaatttaaggttttcattacagtattacctgacatcgtcgttttaattaatgtaagcatataaataaatatgacgatagggacaggtaatacgaaccatcctaaatgtatacgtttaaaaaatctatacaggataggaataatgagtgcgaatattaacggtaatatcaccgcaatatgtaacaaactcactatgttgtcctcctttaaaaaatatttatgttattcattatacatgaatgatatagttctgaaaaacgtacacactccttgttgtgctttattttcagaagtatttaaataagaagaaacacgtcattttttatttaaaattttctttgtattgaagtgaataatcttcttttaagcgtgctaaactagctaaagacatttcagcatgttttgtttgctgagctttaagtttagtttctaaatctgtaattgcttgttgaagtgaatcttcatagcgcaatacatcaacattgaagtcgcgtaattgtgaacgtttcgtatagcgtttttcaaaatggcttaatgctttgcgttcatggaaaaatacaccttcagtttcagtagggttatgtaaatcaccttgtttcgggtgtttgataacttgttcaactttaacaaggacatcgtctccattttcttcaacaatcgtgacaccatagctacctgttttgtgtgaaaatcgatatagcttcatgctattttcctcccttaaaagtatgttaatatatatgtatcataacatgaatggagaatataaatggctaactatccacagttaaacaaagaagtacaacaaggtgaaattaaagtggttatgcacacaaataaaggtgacatgacattcaaattatttccaaatattgcaccaaaaacagttgaaaattttgtgacacatgcaaaaaatggttattatgatggaataacattccaccgtgtcattaatgacttcatgattcaaggtggcgatccaacagctactggtatgggtggcgaaagtatttatggcggtgcttttgaagatgaattttcattaaatgcatttaacttatatggcgcattatcaatggctaactcaggacctaatactaatggttcacaatttttcattgttcaaatgaaagaagtacctcaaaatatgttaagtcaacttgcagatggtggctggcctcaaccaatcgttgatgcatatggcgaaaagggtggtacaccatggttagatcaaaaacatacagtattcggtcaaatcattgatggtgaaactactttagaagatattgcaaatacaaaagtgggaccacaagacaaaccacttcatgatgttgtaattgaatctattgatgttgaagaataatagctaaacataattaactaccaacattttaaactcggataaagctaatttatgaatggattagtatatattccaacgaaacaaataaactaacatgatgagcaatctcaatatatttatcaagaaagcacagtttttaaatagatgtgtattctaaagataatagttgaggttgctttttatgtttttaaagagaattgctattcaaatagttaataaattgaaaacaaagtagctggatatcatattgatttagataggagtttgttgctaattttatttgtaaatccaagtttgtagaattcttattcatttataaaataatattcgtatgatttgatgttttaattagtccaccatttcgatttgtgctatgataatagtgttaagtaaacgaaataaggggttattaagttgaataactacaaaattggccaacatatcaaggtgcgtgtaactggtattcaaccatacggtgcgtttgttgagacccctaatcatactgaaggactgattcatatatcagaaattatggatgactacgttcataatttgaagaaatttctatcagaaggccaaattgttaaagctaaaattttgtctatagatgatgaaggaaagcttaatctatcattaaaggataatgattacttcaaaaattatgagcgtaagaaggaaaaacaatcagtattagatgaaatcagagaaacagaaaaatatgggtttcaaacacttaaagaacgcttaccaatctggataaaacagtcaaagcgagcaattcgaaacgactaaaggaacagataaatcgtaccgaaaatcatacaaagggtctgaaatgaaagtttcttagactataaaagagattagtatctattaaattttattagatactaatctctttttgtctacgataacgtaatatgattgattctatttacacgtacaaatggtttaaggtgacatatccattatctttgatagatagaatcattgatttgcaatattgtatgtggatttgtttttttaatttattttagaaatgagaactacaacttaaagtattaaacgaattgcaactatataaacagataattggagaatgaaaaaattacatgttatagtcaactcaataattttaaggaggaattaagtaatgaaaagtaaatacgaaccattgtttgataaagtagaattaccaaatggagtagagttgagaaatcgatttgtgttagcccctttaacacatatttcttcaaatgatgatggtactatttcagatgtagaacttccttatattgaaaagcgttcacaagatgttggtattacaattaatgctgcgagtaatgtgagtgatgtcggaaaagcatttccaggacagccatcaatcgcgcatgacagtgatattgaaggactaaaacgattagctacagcaatgaagaaaaacggtgccaaagcactcgtacaaatacatcatggcggtgcacaagcattgcctgaattaacacctggtggagacgtcgtagcaccaagtccaatttctttaaaaagtttcggtcagaaacaagaacatagtgctagagaaatgacgaatgaagagattgaacaagcaatcaaggattttggtgaagcaacgcgacgtgcaattgaagcaggatttgatggtgttgaaatacatggcgcgaatcattacttaattcatcaatttgtatcaccatactataatagaagaaatgatgtttgggcaaatcaatataaattcccggtcgctgtgattgaagaggtgcttaaagcgaaagaagcgtatggcaataaagactttatagttggatacagattatctccagaggaagcggagtctccaggaatcacaatggaaattacagaggaactcgttaataaaattagccatatgccaatcgactatattcatgtttcgatgatggatacgcatgcaacgacacgtgaaggtaaatacgctggacaagaaagactgcctttaattcacaaatggataaatggtcgtatgccacttatcggtattggttcaattttcacagctgacgaagctttagatgcagttgaaaatgttggtgttgacttagtagccattggtagagagctactactggattatcaatttgttgaaaaaattaaagatggacgggaagatgaaattattaattactttgatccagagagagaagataatcatcacttaactcctaatttatggcatcaatttaatgaaggattctatccattaccacgtaaagataaataagtgtttaactgttaccactaatgatattgtgtatgcaatttgttagtggttttcaatatttataaataaaaatattcttagtaaaatatacttttgattaagtgtaaaattatcaattcttttgcttgtaatcatttaagtaattatgtcattataaatgtaagggttttcaaaatagacaaatttaatgaaacttagtgattatttcatcttttttggtggaaaagtatctgctttgaaaactaatgtaattatttggataatgtttcatgtataatagttataaatgatgaaaaggggagatatgatgactaaatctgaaaaaattattgagttaacaaatcattacggagcacataattatttaccattgccaattgtcatttcagaagctgaaggggtatgggttaaagatcctgaaggcaataaatatatggatatgttatctgcatattccgctgttaaccaaggtcatagacatccgaaaattattcaagcattaaaagatcaagctgataaagtgactctagtttcacgtgcttttcatagtgataacttaggtgaatggtacgaaaaaatttgtaaactggcaggtaaagataaagctttaccaatgaatacaggtgctgaagcagtagaaacagctttgaaagcagcacgacgctgggcatacgatgttaaaggaattgagccaaataaagcagaaatcattgcatttaatggtaacttccatggtcgaacaatggcgccagtttcattatcttcagaagcagaataccaacgtggttatggtccgttattagatggatttagaaaagttgattttggagatgtagatgcattgaaagctgcaattaatgaaaatactgcagcagttttagtagaaccaattcaaggtgaagcgggtataaatataccgccagaaggatatttgaaagcaattagagaattatgtgatgaacataatgtcttatttattgctgacgaaatccaagcaggattaggtcgttcgggtaaattatttgctacggattgggataatgtaaaacctgatgtctatattttaggtaaagcactaggtggtggtgtcttcccaatttctgttgtattagcagataaagaagtattagatgtctttacacctggctcacatggttcaacatttggtggtaatccacttgcttgtgctgcatcaattgctgcattagatgttatcgttgatgaggatttaccagggcgctctttagaattaggagattattttaaagaacaattaaagcaaattgatcatccatcaattaaagaagtccgtggacgtggtttgtttataggtgtggaacttaatgaaagtgctagaccatattgtgaagctttgaaagaagaaggcttattatgtaaagaaacgcatgatactgtcattcgttttgcaccaccattaattattactaaagaagaattggaccttgcacttgaaaaaataagacatgtatttcaataatgtcaaaaagttgtaacaatcagtttgtaagggctttaaaaaggaatacgttatgttacaatatgtttgaaagcgaaatcattaggtaaagaagaggcgaaaaggatcatgactgagaacaataatttagtaacttctactcaaggaattattaaagaagcattgcataaattgggatttgacgaaggaatgtacgatttaattaaagaacctttaagaatgttacaagtgcgtatccctgtacgaatggatgatggcacagttaaaacattcacaggttaccgtgcgcaacataatgatgctgttggaccaacaaaagggggcgtgcgtttccacccagatgttgatgaagaagaagtaaaagcattatcaatgtggatgactttgaaatgtggcattgtaaacttaccatacggtggtggtaagggtggtatcgtttgtgatccacgtcaaatgagcattcatgaagttgaacgtttatcacgcggatatgtaagagcaatttcacaattcgtaggtccgaacaaagatattccagcaccagatgtatttacaaactcacaaattatggcttggatgatggatgaatatagtgcattagataaatttaattcaccaggtttcatcacaggtaaaccaattgtattgggtggttctcatggacgcgacagatcaactgcactaggtgtagttattgcaattgaacaagctgcaaaacgtcgtaatatgcaaattgaaggtgccaaggttgttattcaaggtttcggtaatgccggaagtttcttagctaaattcttatatgatttaggtgcaaaaattgtaggtatctctgatgcttacggtgcattacacgatccaaatggcttagatatagattatttattagaccgtcgtgatagttttggtacggtaacaaatttatttgaagaaacaatctcaaataaagaattgtttgaattagattgtgacattttagtaccagcggctatttcaaaccaaattacagaagacaatgcacatgatattaaagctagtatcgttgttgaagctgctaatggacctacaacaccagaagcaacacgtattttaactgaacgtggtatattattagttccagacgtattagcaagtgctggtggtgtaacggtttcttacttcgaatgggtacaaaataatcaaggttattattggtctgaagaagaagttaatgaaaagctacgtgaaaaattagaagcggcatttgatacgatttacgaattgtctcaaaaccgaaaaatagatatgagacttgcagcatatatcataggtattaaacgtacagcagaagcagctagatatcgtggttgggcataattaattatcatatgtgatttaacgagcttgggacagaaaacaaagccctaagctcgttaattttattttagcagtagttgactgtaaaacaatgcccgtgtaacacgctcttttcaaaaatagtcggggccccaacacagagaatttcgaaaagaaattctacaggcaatgcaagttggggatgggccccaacacagagaaattggggagccaatttctacagacaatgcaagttggggtgggacgacgaaataaattttgcgaaaatatcatttctgtcccactcccaaaaagacagcagtaggataatttcaatttggaaatatcttactgctgttttttatagtaatagctatatttttgtatttatgttttctagtttaacattactacttaatgacttctttatatttatcagcgaaatttgtaaagacaccatcaacgccatatttatttaatcgtaacatatcagctttttcattcactgtataaggatgtactataaatcctaagtcttttaaatgatgggtattttgttcagttaaatctgtataatcaggacctaatccaatcgcataagagcgtatctcttttaagcgttggtcgttaaattgttgtagttcacctttatcaactaattttactaatggcacatgcttattttgacgatgaattttctttaaactttcgtcagaaaatgattgaatcattacatgtccattttttaatttattgttatttaaaaggtgatgctttttcaatgaagctaataattgttcttccattcctgggtatacatcaggtgactttgtttcaatataatagtttgcattcgggccataacgttctaaaatttcatctaaagtgggtactttagcatttttataacttgctcttgcgtattttggatattttttattaaaccaacttcctgcatctaactgttttaattcatcaagggtataatcctcaactttaccgtgtccatttgttgtacggttaacagtttcatcatgcatagcaactaaatggccatctttggtacgttgtaaatcaatttcgatataagatgcttttaactcattatgactcttatcatatgcttgaaacgtatgctcgggtgcatagccacttgcgccacgatgtgcgatagtagtgaatcgctcattcgttaaatttgtatgccattgaatagcctgaggtttatttgcaatttgatttgtttgttcagcgccagcagtaggtactgataaaaatcccatagtaaaaacagcagaagcagccataaatttagtgaagcttttcgaagagttagtcatagtctttatcctttcatctctttatttgtagtctaacaattttaaaatactacaaaaacctgcttgtgaaaacgctttacacatttcttttacaatttataacatttttgtaatataaatttaaaagaattatcaaacattttaggaatcttaaaaatgtgatgttcaacaagacgaagagagcattaaaatacccacaatgtaattttaatagacattgtgggtaggtagattaacgtatttattgtgatagtaattgtttagcaacatcaagttgttgtttgaccgatgattgacctgttgaaccgtaactttgacgtcgttttaaacaattttcaggctgcaaataatcgtaaatatcggcatcaatactagaatgatgttgttgatatgttgctaaaggaacatctaataaataatgaccttgttgtatacattctaagacgatttttcctacaatttcatgtgcagttctaaatggaatatttttagttactaaataatctgctagttccgttgcatttgaaaaatcttctttaacagtttgattgagtcgttctttattaattgtcatcgtttgaatcataccttcgaaaatacgtaaagaacctttaattgtatggacagcatcgaataaaccttctttatcttcctgcatatctttgttatatgctagaggtaatccttttaaagtcataagcatgctcattaaatgaccagtcgttcgaccaactttacctctaattaattctgccatatcaggatttttcttttgtggcataatagatgagccagttgaaaatgcatctgataatgtaatgaatttagcttcgtctgtggaccagaaaataatttcctctgcaaagcgtgataagtgaaccatcgttaaagaaatattatgcaatgtttcaataatatagtctctgtcactaacagcatctaggctattctcatagagactgccaaagttcaacaatgctgttgtctcgtgtctatcgatagggtatgtggtaccacttaaggctgctgcacctaaaggattaatatcgattcgttttaaactatcttcaaatcgttgttggtctcgttgtaacatccaaaaataagtcataatatgatgtgcaaatgaaattggctgtgcacgctgtaaatgagtataaccaggcataattgtatcaacattattggaagcgatgtctacaattacactttgtaacgacttaattaatgcgatgatatcttgcacttgtttcttagtgtacaagtgcatgtctgttgcaacttgatcgtttctactgcgtccagtatgcaacttaccaccagcatcaccaatacgtttaattaattcatgttcaatatttaaatgaatatcttctaatgatgcactaaattgaatttgatcttgatgataatcatgttgaatagattttagtccttgtataatttgttcgctgtcttgttgactaataatgccttgattcgcaagcatagttgcatgtgcaatgctgccttcgatatcttgatttatgagcgtttgatcaaaagtaatggatgcgttaaagtcgtcaacccactcttcaggttgtacttcaaatctaccgccccaagctttattgctcattgctatagcctccatgtagcatcgaatttacttgagtaggtaaaccatagatatcgataaagccgacagcagcgtcttgattaaatgcatcttcttttgtataagttgctaatttttcatcatataatgtgtaaggtgattttctaccatttacgatggcattacctttgaataatttaattctgacatcaccacttacgtattgctgagtactatcaataaataattttaagctatcagttaaaggtgagaaccaaagtccattgtatagttgttcagcaaattgcttctcgatgattggtttaaagtgtgcgacatctttcgttaacgtaatcgtttctaatgctttatgcgcttttaaaataacttctgcagcaggtgcctcataaatttctcttgatttgatacctacaagtctattttctacatggtcaattcttccgataccatgcttaccagctaatgcattcaacgttaaaattaaatcgtctaattcatatgttttgccatcaatttgaactgggatgcctttatcaaacgttaaaatgatttcatcagcagcatctggtgtttcttctaaagcatttgttagatcgaacgcatcctctggtggcgcagcataaggatcttctaaaataccacattcattcgctctgccccatagattttgatcgatagaataaggtgaatcatggttgattgatacagggatattatgtttaattgcataatcgatttcttcttcacgactccatgcccactcacgtacaggtgcgaatgctttcaatgatgggtttaatgctttaatggcaacttcgaaacgtacttggtcattccctttaccagtacaaccatgtgcaatacctactgaatttgttttctcagcaatctctactaattttttagcgattaatggtcttgataaagctgaaactaatggatatgcattttcatacattaaatttcctttgattgcataacttacatactcatcactaaattcttttgttgcatcaataatatgacattcaactgctcccatatctaaagcttttttataaacgatgtctaaatctttaccttcaccaacatctaggcaacaagctacaacgtcgtatcctttgtcgataagccattgaacggccacacttgtatctagtcctcctgaatatgctaaaacaattttctctttcataaaattcacctcattgtagttatctgaatatttcgtatgaacacatgatagcaaacttttagtgaaaataaaaccattattttacatatttattcataaaatacgatagagatagttagagttgtaagtataaatgcttatttatcaatgtttaaaagtattttaaaaaacatgcaaattgtataaaaaatgtttgagtgtttgacgccagtttgaaatgtttgttgaaaaataggtgtgaaacgtcacataaatatcaattttattgattaagtacaaacttgtgaattgaatcgcaaacgtaaacttagtaaaattaagatattaaatgaaacaggaggcttttatagatgactcatattcaattagattttagtaaaacgttagaatttttcggtgaacacgaattaaaacaacaacaagaaattgttaaatcaattcacaaaacaattcatgaaggtactggtgcaggtagtgacttcttaggctgggttgatttaccagttgattacgacaaagaagaattttcaagaattgttgaagcatcaaaacgcattaaagaaaattctgatgttttagtagtcatcggtattggtggttcttacttaggtgcacgtgcagcaatcgaaatgttaacgtcatcatttagaaacagcaatgaataccctgaaattgtatttgttggtaatcacttatcatcaacatatacgaaagagttagttgattatttagcagacaaagatttctctgtaaacgttatttctaaatctggtacaactacagaaccagcagttgcatttagattgttcaaacaattagttgaagaaagatacggtaaagaagaagcacaaaaacgtatatttgcaacaacggataaagaaaaaggtgctttaaaacagttggctacaaacgaaggttatgaaacgtttatcgtacctgatgatgtaggtggaagatattctgttttaacagcagtaggattattaccaattgcaactgctggaattaacatcgaagctatgatgattggtgctgcaaaagcacgtgaagaattatcttcagataaattagaagaaaacattgcataccaatatgcgacaattcgaaacattttatatgcaaaaggttatacaacagaaatgttgattaactatgaaccatctatgcaatactttaatgaatggtggaaacaattatttggtgaatcagaaggtaaagacttcaaaggtatctatccttcaagtgccaactacacaactgatttacattctttaggtcaatatgtacaagaaggccgtcgtttcttattcgaaacagtggtaaaagtaaatcatcctaaatatgatattactattgaaaaagatagtgatgatctagacggattaaattatttggctggtaaaacaatcgacgaagttaacacaaaagcattcgaaggtacattattagcgcatactgatggtggtgttcctaacatggtagtgaacattccacaattagatgaagaaactttcggttatgtcgtatacttcttcgaacttgcttgtgcaatgagtggataccaattaggtgtaaatccatttaaccaacctggtgtagaagcatataaacaaaacatgttcgcattattaggtaaacctggttttgaagacttgaaaaaagaattagaagagcgtttataaaatacattacttcaatgattagtgaagtttgaaaagatagaactagacgttaactatttaaagcatattttcgaggttgtcattacaaatgtaaaaatgtaatgacaacctcgtttttatttatatgcaagaactaggttactagctaatgtgacaagatgttaagagaaaattaaagaaaaaataacatctgtcatacaataatattgttatactactagagactgatttattagcatgattacatgttaatgtttctttacttagtaattaactttataatgtaagaataattatcttcaaccaaagaaagggattgatgatttgtcgtttcatcaagtagaagaatggtttgagatatttcgacagtttggttatttacctggatttatattgttatatattagagcgataattccagtatttcctttagcactctatattttaattaacattcaagcttatggacctattttaggtatattgattagttggcttggattaatttctggaacatttacagtctatttgatctgtaaacgattggtgaacactgagaggatgcagcgaattaaacaacgtactgctgttcaacgcttgattagttttattgatcgccaaggattaatcccattgtttattttactttgttttccttttacgccaaatacattaataaattttgtagcgagtctatctcatattagacctaaatattatttcattgttttggcatcatcaaagttagtttcaacaattattttaggttatttaggtaaggaaattactacaattttaacgcatcctttaagagggatattaatgttagttgtgttggttgtattttggattgttggaaaaaagttagaacagcattttatgggatcgaaaaaggagtgacatcgtgaaaaaagttgtaaaatatttgatttcattgatacttgctattatcattgtactgttcgtacaaacttttgtaatagttggtcatgtcattccgaataatgatatgtcaccaacccttaacaaaggggatcgtgttattgtaaataaaattaaagttacatttaatcaattgaataatggtgatatcattacatataggcgtggtaacgagatatatactagtcgaattattgccaaacctggtcaatcaatggcgtttcgtcagggacaattataccgtgatgaccgaccggttgacgcatcttatgccaagaacagaaaaattaaagattttagtttgcgcaattttaaagaattagatggagatattataccgcctaacaattttgttgtgctaaatgatcatgataacaatcagcatgattctagacaatttggtttaattgataaaaaggatattattggtaatataagtttgagatattatcctttttcaaaatggacgattcagttcaaatcttaaaaagaggtgtcaaaattgaaaaaagaattattggaatggattatttcaattgcagtcgcttttgtcattttatttatagtaggtaaatttattgttacaccatatacaattaaaggtgaatcaatggatccaactttgaaagatggcgagcgagtagctgtaaacattattggatataaaacaggtggtttggaaaaaggtaatgtagttgtcttccatgcaaacaaaaatgatgactatgttaaacgtgtcatcggtgttcctggtgataaagtagaatataaaaatgatacattatatgtcaatggtaaaaaacaagatgaaccatatttaaactataatttaaaacataaacaaggtgattacattactgggactttccaagttaaagatttaccgaatgcgaatcctaaatcaaatgtcattccaaaaggtaaatatttagttcttggagataatcgtgaagtaagtaaagatagccgtgcgtttggcctcattgatgaagaccaaattgttggtaaagtttcatttagattctggccatttagtgaatttaaacataatttcaatcctgaaaatactaaaaattaatatgaaacaaatacaacatcgtttgtcggttttaatactgataaacgatgttttattttgttagtaccacaataaaagctaagttcgaaatgaacttataataaatcaatcacaatcactttgtgttaaaatatgtgtcaaaggaagtgagggtttgtcatgacattacatgcttatttaggtagagcgggaacaggtaagtctacgaaaatgttgaccgaaataaaacaaaaaatgaaagcagatccgcttggagatccaatcattttaattgcgccaactcaaagtacatttcaattagaacaagcctttgtcaatgatccggaattaaatggtagtttaagaacagaagtgttgcattttgaacgattaagtcatcgtattttccaagaagttggtagttatagcgaacaaaagttatctaaagctgcaacggaaatgatgatttataacattgttcaagaacaacaaaagtatttaaaactttatcaatcacaagcaaaatattatgggtttagtgaaaaattaacagaacaaattcaagattttaaaaaatatgcagtaacgcctgaacatttagaacactttattgctgataaaaatatgcaaactcgaactaaaaataagttagaggatattgctttaatataccgtgagttcgaacaacgcattcaaaacgagtttattactggtgaggattcattacaatattttattgattgtatgccgaaatcagagtggctaaaacgtgctgatatatatattgatggttttcacaacttttcaacgattgagtatttaataatcaaaggattaattaaatatgcgaagagtgtcacaattatattgacgacagatggtaaccacgatcaatttagtttatttagaaaaccatcggaagtgttacgacatattgaagaaatagcaaatgaactcaatatttctattgaacgtcaatatttcaaccaattatatcgcttcaataatcaagatttaaagcatcttgaacaagaatttgatgtacttcaaatcaatcgagtggcatgtcaaggtcatatcaatattttagaatctgcgactatgagagaggaaataaatgaaattgcgcgacgtatcatcgttgatattcgtgataagcaattacgatatcaagatattgctattttatatcgtgatgaatcttatgcttatttatttgattccatattaccgctttataatattccttataatattgatacaaagcgttcgatgacacatcatccggtcatggaaatgattcgttcattgattgaagttattcaatctaattggcaagtgaatccaatgctacgcttattgaagactgatgtgttaacggcatcatatctaaaaagtgcatacttagttgatttacttgaaaattttgtacttgaacgtggtatatacggtaaacgttggttagatgatgagctatttaatgtcgaacattttagcaaaatggggcgtaaagcgcataaactgaccgaagatgaacgtaacacatttgaacaagtcgttaagttaaagaaagatgtcattgataaaattttacattttgaaaagcaaatgtcacaagcggaaactgtaaaagattttgcaactgctttttatgaaagtatggaatatttcgaactgccaaatcaattgatgacagagcgagatgaacttgatttaaatggtaatcatgaaaaggcggaggaaattgatcaaatatggaatggcttaattcaaatccttgatgacttagttctagtatttggagatgaaccaatgtcgatggaacgtttcttagaagtatttgatattggtttagaacaattagaatttgttatgattccgcaaacattggaccaagtaagtattggtacgatggatttggctaaagtcgataataagcaacatgttttcttagtaggtatgaatgatggtacgatgccacaaccagtaactgcgtcaagcttgattacagatgaagaaaagaaatactttgaacagcaggctaatgtcgagttaagtccaacatcagatattttacagatggatgaagcatttgtttgctatattgctatgacaagagcgcgacaagatgttacattttcttacagactaatgggatcaagtggtgatgataaggagatcagcccatttttaaatcaaattcaatcattgttcaaccaattggaaattactaacattcctcaataccatgaagttaacccattgtcactaatgcaacatgctaagcaaaccaaaattacattatttgaagcattgcgtgcttggttatatgatgaaattgtggctgatagttggttagatgcttatcaagtaattagagatagcgatcatttaaatcaaggtttagattatttaatgtcagcattaacgtttgacaatgaaactgtaaaattaggtgaaacgttgtctaaagatttatatggtaaggaaatcaatgccagtgtatcccgttttgaaggttatcaacaatgcccatttaaacactatgcgtcacatggtctgaaactaaatgagcgaacgaagtatgaacttcaaaactttgatttaggtgatattttccattctgttttaaaatatatatctgaacgtattaatggcgattttaaacaattagacctgaaaaaaataagacaattaacgaatgaagcattggaagaaattttacctaaagttcagtttaatttattaaattcttcagcttactatcgttatttatcaagacgcattggcgctattgtagaaacaacactaagcgcattaaaatatcaaggcacgtattcaaagtttatgccaaaacattttgagacaagttttagaaggaaaccaagaacaaatgacgaattaattgcacaaacattaacgacaactcaaggtattccaattaatattagagggcaaattgaccgtatcgatacgtatacaaagaatgatacaagttttgttaatatcattgactataaatcctctgaaggtagtgcgacacttgatttaacgaaagtatattatggtatgcaaatgcaaatgatgacatacatggatatcgttttacaaaataaacaacgccttggattaacagatattgtgaaaccaggtggattattatacttccatgtacatgaacctagaattaaatttaaatcatggtctgatattgatgaagataaactagaacaagatttaattaaaaagtttaagttgagtggtttagttaatgcagaccaaactgttattgatgcattggatattcgtttagaacctaaattcacttcagatattgtaccagttggtttgaataaagatggctctttgagtaaacgaggcagccaagtggcagatgaagcaacgatttataaattcatccaacataacaaagagaattttatagaaacagcttcaaatattatggatggacatactgaagttgcaccattaaagtacaaacaaaaattgccatgtgctttttgtagttatcaatcggtatgtcatgtagatggcatgattgatagtaagcgatatcgaactgtagatgaaacaataaatccaattgaagcaattcaaaatattaacattaatgatgaatttgggggtgagcaatagatgacaattccagagaaaccacaaggcgtgatttggactgacgcgcaatggcaaagtatttacgcaactggacaagatgtacttgttgcagccgcggcaggttcaggtaaaacagctgtactagttgagcgtattatccaaaagattttacgtgatggcattgatgtcgatcgacttttagtcgtaacgtttacaaacttaagcgcacgtgaaatgaagcatcgtgtagaccaacgtattcaagaggcatcgattgctgatcctgcaaatgcacacttgaaaaaccaacgcatcaaaattcatcaagcacaaatatctacactccatagtttttgcttgaaattaattcaacagcattatgatgtattaaatattgacccgaactttagaacaagcagtgaagctgaaaatattttattattagaacaaacgatagatgaggtcatagaacaacattacgatatccttgatcctgcttttattgaattaacagagcaattgtcttcagatagaagtgatgatcagtttcgaatgattattaaacaattgtatttctttagcgttgcaaatccaaatcctacaaattggttggatcaattggtgacaccatacgaagaagaagcacaacaagcgcaacttattcaactactaacagacttatctaaagtatttatcacagctgcttatgatgctttaaataaggcgtatgatttgtttagtatgatggatagcgtcgataaacatttagctgttatagaagatgaacgacgtttaatggggcgtgttttagaaggtggctttattgatataccttatttaactggtcacgaatttggcgcgcgtttgcctaatgtaacagcgaaaattaaagaagcaaatgaaatgatggtcgatgccttagaagatgctaaacttcagtataaaaaatataaatcattaattgataaagtgaagagtgattacttttcaagagaagctgatgatttgaaagctgatatgcaacaattggcgccacgagtaaagtaccttgcgcgtattgtgaaagatgttatgtcagaattcaatcgaaaaaagcgtagcaaaaatattttggatttttctgattatgaacattttgcattacaaattttaacaaatgaggatggttcgccttcagaaattgccgaatcataccgtcaacacttccaagaaatattggtcgatgagtatcaagatacgaaccgagttcaagagaaaatactatcttgcatcaaaacgggtgatgaacataatggtaatttatttatggttggagatgttaagcaatccatttataaatttagacaagctgatccaagtttatttattgaaaagtatcaacgctttactatagatggagatggcactggacgtcgaattgatttgtcgcaaaacttccgttctcgaaaagaagtactgtcaacgactaactatatattcaaacatatgatggatgaacaagtcggtgaagtaaaatatgatgaagcggcacagttgtattatggtgcaccatatgatgaatcggaccatccagtaaacttaaaagtccttgttgaagcggatcaagaacatagtgatttaactggtagtgaacaagaagcgcattttatagtagaacaagttaaagatatcttagaacatcaaaaagtttatgatatgaaaacaggaagctatagaagtgcgacatacaaggatatcgttattctagaacgcagctttggacaagctcgcaatttacaacaagcctttaaaaatgaagatattccattccatgtgaatagtcgtgaaggttactttgaacaaacagaagtccgcttagtattatcatttttaagagcgatagataatccattacaagatatttatttagttgggttaatgcgctccgttatatatcagttcaaagaagacgaattagctcaaattagaatattgagtccaaatgatgactacttctatcaatcgattgtaaattacattaatgacgaagcagcagatgcaattttagttgataaattaaaaatgtttttatcagatattcaaagttaccaacaatatagtaaagatcatccggtgtatcagttaattgataaattttataatgatcattatgttattcaatactttagtggacttattggtggacgtggacgacgtgcaaatctttatggtttatttaataaagctatcgagtttgagaattcaagttttagaggtttatatcaatttattcgttttatcgatgaattgattgaaagaggcaaagattttggtgaggaaaatgtagttggtccaaacgataatgtcgttagaatgatgacaattcatagtagtaaaggtctagagtttccatttgtcatttattctggattgtcaaaagattttaataaacgtgatttgaaacaaccagttattttaaatcagcaatttggtctcggaatggattattttgatgtggataaagaaatggcatttccatctttagcttcggttgcatatagagctgttgccgaaaaagaacttgtgtcagaagaaatgcgattagtctatgtagcattaacaagagcgaaagaacaactttatttaattggtagagtgaaaaatgataaatcattactagaactagagcaattgtctatttctggtgagcacattgctgtcaatgaacgattaacttcaccaaatccgttccatcttatttatagtattttatctaaacatcaatctgcgtcaattccagatgatttaaaatttgaaaaagatatagcacaagttgaagatagtagtcgtccgaatgtaaatatttcaattatatactttgaagatgtgtctacagaaaccattttagataataatgaatatcgttcggttaatcaattagaaactatgcaaaatggtaatgaggatgttaaagcacaaattaaacaccaacttgattatcaatatccatatgtaaatgatactaaaaagccatcaaaacaatctgtttctgaattgaaaaggcaatatgaaacagaagaaagtggcacaagttacgaacgagtaagacaatatcgtatcggtttttcaacgtatgaacgacctaaatttctaagtgaacaaggtaaacgaaaagcgaatgaaattggtacgttaatgcatacagtgatgcaacatttaccattcaaaaaagaacgcatatctgaagttgagttacatcagtatatcgatggattaatcgataaacatattatcgaagcagatgcgaaaaaagatatccgtatggatgaaataatgacatttatcaatagtgagttatattcgattattgctgaagcagagcaagtttatcgtgaattaccgtttgtagttaaccaagcattagttgaccaattgccacaaggagacgaagacgtctcaattattcaaggtatgattgacttaatctttgttaaagatggtgtgcattattttgtagactataaaaccgatgcatttaatcgtcgccgtgggatgacagatgaagaaattggtacacaattaaaaaataaatataagatacagatgaaatattatcaaaatacgcttcaaacgatacttaataaagaagttaaaggttatttatacttcttcaaatttggtacattgcaactgtagtattttgattttcaaaagaataaaaaataatttcgattaagtgcaaagcccttgtagcagaatgaacataactcattttcaaaattgtcttacttatttatttgttatttgataacgaaaaaagttataatgtgaattaagataaagatgaggagttgagaatgaatgaaattcttatcattcaagtataatgacaaaacttcatatggcgttaaagtaaaacgcgaagatgctgtatgggatttaacacaagtatttgctgactttgcagaaggagatttccatcctaaaacattgttagctggtttacaacaaaatcatactttagattttcaagaacaagtacgtaaagcagttgtagcagcagaagatagcggcaaagctgaagactataaaatttcatttaatgacattgaattcttaccaccagtaacacctccgaataatgtgattgcttttggtagaaattacaaagatcatgcgaacgaattaaatcatgaagtagaaaaattatatgtatttacaaaagcagcgtcatctttaacaggagataatgcaacaattccaaatcataaagatattactgatcaattagattatgaaggtgaattaggtattgttattggtaagtctggtgaaaagattccaaaagcattagctttagattatgtttacggctatacaattattaacgatatcactgatcgcaaagcacaaagtgaacaagatcaagcatttttatcaaaaagtttaactggcggttgcccaatgggtccttatatcgttactaaagacgaactaccattacctgaaaatgtaaatattgttacaaaagttaacaatgaaattagacaagatggtaacactggcgaaatgattcttaaaattgatgaattaatagaagaaatttcaaaatatgttgcactacatccgggagatattattgcaactggtacaccagcaggcgttggtgcaggtatgcaaccacctaaatttttacaaccaggtgatgaagttaaagtgactattgataatattggaacgctgacaacttatatcgctaaataattatcatttaaaaagctaaccagtctttatatagattggttagttttttcttgcttttctaaaaaggtgttaaagataaattatttataatgttaccattttgagatgaaagtgaaatattgatattaagaagtagttgattattttacagcagattcacaatattctaataaggaataaaatgtcatgttcttcctctcaaatatagaagtgtggtagaatatatattcgtgtataatcaaatcatgattaaattacaagcaagtgggtattaatcccaagaagctttaatttaataatataaataattaaagtggggggaatcagtatgttacatttacatatattaagttgggtattagcgattattttatttatcgctacatacttaaacatttcaaaaaatcaaggcggatcaccatttttcaaaccgttgcacatgattttacgcttatttatgctgttgacgttaatttcaggattttggatattaattcagtcatttatgaatggcggggcaaatcatatgttgcttacattgaaaatgctgtgtggtgttgcagtagttggattgatggaagtgtcgattgctaaaagaaagagacatgaacaaagtcacaaaatgttttggataacaatggcattaattatcatcacaatggtattaggtgtcattctaccgttagggcctatatcaaaattattcggtattggctaattgataagacatatagtatatgacataaggcatggacaattattagtccaagaccttatgtcttttttgattctaaaaatgtttaaacataaaaaaaggactggatagtagtaccagtccaacataattctaacctagacaattaagattagattgaatcgcatgattcatttatttagctttgtaaccaatcatattgattaaatctttagggtggctatatggtggtgcataagccacttcaaactcagttaactcatctacagttagctggttcatcattgccatcgatagtacatcaatacgtttatctgcaccttcttttcctactgcagctgctcttaaaatctgacggtttgaagtgtcataatatacccttaagtgtaaaggggaatttcctgggtaataattcgcgtgtgcaccttgagtgacttccaccattttatagtcaaattgctttagttcatttggtttaacgccgacactcgcaaatgtataatcaaagaacttcacaatattgttgcctaagaagcctttgaattcaatagtgtcatttccagcaatttgttcggcaacaatacttgctgcacggtgagcgccccaagctaaaggaacactagccggtagatcgacatgtcgataatgtgatgttgcaatatcgcctattgcataaatgtttggaacatttgtttcaaatttatcgtttaccggtatgaaaccttttcgatcaagtttgatatttgaactttcgataaattttgaattggggtgagtaccgacaccttcaataatcatatcgtaatgttcaacttttcctgatttaaatgtaatttcatttccattgatagcatcaatttcctcatttaaacggtatggaatctcccgcttatctaattcatcaagtataggttgattcatgtcagcatccattaatttatttatcttatcagatcgatgaattaaagtagggtgtaaaccacgttcgtaaagattttcaagaacttctaatgaaacataccctgcacctacaactaatactttatcaacttgatttgctttgatgaattgatcgatagcatcagtgtcttctaaatttctaagtgtaaatgtaatatcactttcaaagccaaggctatttgcacttgcaccagggcttaaaatgagtttatcgtaagattcttcaaattgttcgttggtctttctatttaatacagttacagtttgtctttcatcattgattgcaataacttcatgataagtttttactgtaatttgctttctatcataaaatttttcaggtgtatacgctaaagcatattttctatcttcaacaacttcgccaatgacataaggcaatgcacaattagcaaagctcatatcacgatctttttcaaaaataataatgtcactttctttatctaaacgtcgaatttggctggcacatgttgcaccgccagcgactgctccgactacgactattttgggcatcgtaacttacctcctattgttttaaaatattataaaatgattagttataaattaacagtaatatctaatatttaaattaaagaaatcattcaaatatcgaccaatgccatcttcattattgttgaatgtaatattgttcgctacatctttaagttcttgcaaaccattttccatagcaacaccatggcgggcgtactcaatcatttcaatatcattatcttcatcaccgaatgcaataatattatttcggtcaatatttaaaaattgtctaacttgctcaatgcctcttgctttattaataccaagttttacaatttcaatgacagggaatggtgcgccccagcgtcgatgctcaatatgatcggcataaaaatgagtaagcatatttttgatttcaggtattttactttcttcggcttcaattaaaattgaggtaggggattctttcaagtggacaagtaaattaccagtttgaattcttggattacccattgaaaaaccttcaaataatcttggatcatgattgttaatgaaaacataatctttcacttctgctataatattcgatacttgatattgttgtaatccttgaataatgttttgtgcgatgcctaaatctaaaatttcatggcaagttttgaagtttttatctttagggtgatgtacgtaagcgccattaaaattaacaattggtgtcgttaaatttaattcatgataatacatttgacttgcacgataaggtctgccagtcgcaatcataatttggtgtccacgttgttgtaattcatttaatacttgtttagtatatgatgaaatttctttgttatcgtttaataatgttccgtctaagtctagacatattaaatgtggttgcatatctctctcctcataagttgcttagttcatatagatacatcatagcattttattggcgttttgtcggatatttgatatattatgaataatatgacattaaagaggtgatatggatggaagaggcattgaaagatagtatcttaggtgcattagaaatggtaattgaccctgaattaggaattgatatcgttaatttaggtttagtatacaaagtgaatgttgatgatgaaggcgtatgtacagttgatatgactttaacatcaatgggatgtccaatgggacctcaaattattgatcaagttaaaacagtattagcagagattcctgaaatacaggatactgaagtgaatatcgtatggagtccaccttggacaaaagatatgatgtcacgttacgctaagattgcacttggtgtgagctaacataaacgtgcattgcctgtagaatttcttttagaaattctctgtgttgggtccccgcagtcaatataacattgtagagtataattcattgtgaataagctcccttcaaagtagacattgaaaaatgaaaattttgaagggagccttatttatgttctaggttctgatttcattttgaaaatttatatctaacttgtttcaaaaaatatgaattaagacagtgacttgcacttctaagagtgcgcaattcattttctagttgaatattttcttgaaaatttttataataaattgaatttatattacagttatattacaatacataatacttcatagtttttaagttgccgagttgcattacaaattggatttcgaagtaagaatcatcattggtaatttttttaatttaacagtattttagtcaatatgattttgatgatgtcgtaattcaataatatacatatgcatttcaatattcttttaaacagcataactaaatttaattaagcatctaagaagaacagttttaaaagggaagaatgcaaaaatgaacaaaacaaagggttttacaaagtataagaaaatgagatatatgccagggctcgatggtttgagggcaatcgctgttctaggaattattatttaccacttaaacaagcaatggttgacaggtggctttttaggtgtggatacattttttgtgatctctggttatttaattacaagcttattactcaaagagtatgatgacacaggtatcattaaattgaaaagcttttggatacgtcgtttaaaacgtttattaccagcagtcatagttttattaatggttgtagggacagcaaccttattattaaaatcagataatatcattagggttaaacatgatattattgctgcgatattttatgtatcaaactggtggtatatagcaaaagatgttaattattttgagcaattttcatttatgccattaaagcatttatggtctttagcaattgaagaacagttttacatatttttcccagttattttggttacattattgttaacaattaaaaagcgatacaaaataggatttattttttggggagtatcaataatttctttagggttaatgatgtttatctacagtattaatggggatcattcacgagtgtattttggtacagatactagattacagacattgttactgggtgttattttagcttttttatggccaccgtttaaattgaaaaatgatccacctaaagttgtaaaatatgttattgatagcataggtagtttatcatttatagtacttatattattatttttcattattaatgatgagacgaattggatatatgatggtggtttctatttaatatccatattaacgttatttattattgccagtgtcgttcatccatctacatggatagcgaagatattttcaaatccagtgttagtatttatcgggaaaaggtcttatagtttatatttatggcattttgcagtaattagtttcgtacatagttactatgtagatggacagatacctgtatatgtgtactttatagatataagtttaacaattatatttgcagagctatcatatcgctttatagaaactccatttagaaaagaaggtattaaagctttaaattggcgaccttcttatataccacaatttataagaatggcaattgtagtaaccttgttaattccatttatgttgattttagtaggtgcattcaataaatatggtaaagacattattggagaaaaagcgaatagctttgataccactattgaagataattatttaatgcggatagcaccaattgataacattcacattgatggcttagtaagtgagaagaaaaaggaatcttccgacgtatataataatattaaacctcttttaatcggtgattcagtaatggttgatatcggtgagtcatttaagtcatcagttcctaagtctagaattgatggaaaagtagggcgtcaattgtatcaaaccttacctttagttaaagcgaattattcacaatataaaaaatcatctgatcaagtcgtattagaattaggtacaaatggcgactttactgtcaaacagctcgacgatttacttaatcaatttggaaaagccaagatttatttagttaatacacgtgttccaagaatttatgaggcaaatgtaaatcgattattagctgacgcggcgaaacgaaagtccaatgtcacattaattgattggaataagcgatcacaaggacatagtgaatattttgcaccagacggtgtacatttagagtacaaaggagtcctagctttaaaagatgaaatattaaaagcacttaaaaagaaataacatatgtttaataagtctagttaatgtgtaacgtaacattagctagatttttttattcaaaaaaatatttacaaatattaggaaatttaagtgtaaaagagttgataaatgattatattgggactataatataattaaggtcaaagaaagtcaaagtcaaaagtgcaacttgaccaactctacaaattagaggtgaaattatatggatataaataaaatgacatatgctgttcaaagtgctttacaacaagcagttgaactgagtcagcaacataaattacaaaatatagaaattgaggcaattttaagcgctgccttaaatgaaagtgaaagcttatataaaagtattttagaacgagcaaatattgaggtagatcaattaaacaaagcttatgaagacaaactaaacacgtatgcatctgtagaaggtgacaatatacaatatggtcaatatattagccaacaagcaaaccaattgataactaaggctgaatcatacatgaaagaatatgaagatgaatatatttcaatggagcatattttacgttcggcaatggacattgatcaaacaacaaaacattatataaataataaagtagaagttatcaaagaaattattaaaaaagtaagagggggaaatcacgtgacatcacaaaatccagaagttaattacgaagcattagctaaatatggccgcgacttagtagaagaagttagacaaggtaaaatggatcctgttataggaagagatgaagaaattcgaaatacgattcgtattttaagtcgtaaaactaaaaacaaccctgtgctcattggtgaaccaggtgttggtaaaactgcaattgttgaaggattagcgcaacgtatagttaagaaagatgtgccagaatcattattagataaaactgtttttgagttagatttaagcgcattagtagcgggcgctaaatatcgtggtgaatttgaagagagattaaaagcagtcctaaaagaagttaaagagtctgatggtagaattatattatttattgatgaaatccatatgcttgtaggtgctggtaaaacagatggtgccatggatgcaggcaacatgctaaaaccaatgttagcacgaggagagttacattgtattggtgcaacaactttaaatgaatatcgagaatatattgaaaaagattcggcattagagcgtcgtttccaaaaagtagcagttagtgagcctgatgttgaagatacaatttcaattttacgtggtttaaaagaacgatatgaagtgtatcatggtgtgcgtattcaagatagagccttagttgctgccgctgaattgtctgatcgttacatcactgatcgttttttaccagataaagcgattgatttagttgaccaagcatgtgcaacaattcgtacggaaatgggatcaaatccaactgaattggatcaagttaatagacgtgtcatgcaattagaaattgaagaaagcgcacttaaaaatgaatctgacaatgcgagcaaacagagattacaagaactacaagaagagcttgccaatgaaaaagagaaacaagcagcacttcaatctcgtgtagaatcagaaaaagaaaaaatagcaaatttacaagaaaaacgtgcgcaactagatgaaagtagacaagcgttggaagatgcacaaacaaataacaatttagaaaaagctgctgaactacaatatggaacaattcctcaattggaaaaagaacttagagaattagaggataatttccaagatgagcaaggtgaagatacagatcgaatgattcgtgaagttgtaacagacgaagaaattggcgatattgtcagccaatggacaggcataccagtttcaaaattagttgaaacagaacgtgaaaaattacttcacttaagtgacatcttgcataaacgtgttgtaggtcaagataaagcggttgacctggtttcagatgcagtagttagagcaagagcaggtattaaagatccaaacagacctattggtagtttcttattcctaggtccaactggagtaggtaaaactgaattagctaaatcattagctgcatcattatttgattctgaaaaacatatgattcgtattgatatgagtgaatatatggaaaaacatgcagtatcaagattgataggggcacctccaggatatattggacatgatgaagggggtcaattaactgaagcggttcgtcgtaatccatactcagttattttattagatgaggttgaaaaagcgcatactgacgtctttaatgtattattgcaaattttagatgaaggccgtttaactgattctaaaggacgtagcgttgattttaaaaatactattattattatgacaagtaatattggatctcaagttttattagaaaacgtaaaagagactggtgaaattacagaatcaacagaaaaagctgttatgacaagtttaaatgcatatttcaaaccagaaattttgaatcgtatggatgatatcgtattatttaaaccattatctattgatgacatgagtatgattgtagataaaatcttaacgcaattaaatataagattattagaacaacgaatctcaattgaagtttctgatgatgctaaagcttggctaggtcaagaagcttatgaacctcaatacggtgcaagaccattaaaacgttttgtacaacgccaaattgaaacaccattagcacgtatgatgattaaagagggattcccagaaggtacaacgattaaagttaatttaaattcagacaataacttaacgtttaatgttgaaaaaattcatgaataaaattgaaccaagaatgtgatgattaatcgcattcttggttttttagatttgaaatttattataattgttcattggcaatatactttttaaatgatttaataaacaccaatatttctgggctttcttttttgctgtatatatatgtaaatgaaataggtgcttgtaaaattttcgtgttaataaccgaaatattgtaatcactatttgttgttatataaagaggcaggaatgatataccttgattcatttcgattaatttaattgaagtatgcacatcattgatagatagaaattgtgctttttcataaatatttaaaatattatttttaagtgatgaccaatattctggatggttatcacttattattttgtatttttcaaataaagatgcctcagttagaagatgattattctctttattgggagcaatcaatacaattttaccttcgcatactttttcagaatgaacttctcttagtttaggttgatttctgctaatcccgatgtcatacgtatgattattaatatctttttcaatattttcatttttgacatgaagagaaacatcgataaaaggatgctcgttaaagaaagattttaaaaatttgggcataatgaatgtcgcgatatatgaagacacgacaacatttaatttcgattgaaacatcgtttttttaagttggatatgtttgatgccactttcatattgttcaataaaactttgcgcaattggaagaaatgtatgaccatcttcagtcaagataatttgatttttataagtttcaaatagtttcacattgagatgctgttctaaatttttaatttgcttatgtatagaaggtatagtgagattaatttcttcactagctaatcgatagtttaacgtcttcgctaaaatgacaaatgtatagtaccaatctaaattcatgaacttacctctttcaaaaaagttaataattcattagataatatttaatttttattgcataaaaataatattaatattatatcagaggttatcgagggggtgaagtaatatgattcgaattcaagataatacaataagggatggtatgcaacaaagtaatgttcgaaaaagtctaattataaaaaaagaagtattgaaacaaattaacaagttaaatataaattctgttgaagtaggcatgtgtacaactatcgaggatgaatttaatattcatcaattcagagacattttaagtcctgaaaaagaattagtagtattgactaggcttaatgaaaaagaaataaaaaaaatagtcaaattgaaaattcataatttagtggtaaaaatactattgccaatatctgacttgcatataaaagaaaagcttaatttttcaaataaatattatattcagaaaatcaaagactgcttggatatattaaagaaagataaaaaaggagtagatatttgttttgaagatgcaacaaggacttctagagaaaaattgaaagaatacatggaaattatttcaaaatatcaagttagaacagttacatttgcggacactgtaggatgttcgacaccattagaatacggagatatttttaattactttgtaaaaaaatattctaacataattttttctgctcattgtcataacgatctagggttggctactgcaaatacattagctgcaattttaaatggtgcaaagcaaatagaaactacatttttgggaattggtgagagagcgggtaatgctcctattgaggaaataattactattttgacaaaaaaacaaatagaaagtacggaattcactttacccgacgtatataaaactagtattaatatttctaaaattctcgattttcaaatatcagaaaacaaacctataattggtgaaaatatatttaaacatgaatcaggaattcatcaagatggtactaaaaaaaatataaatatgtatcaatatttagttcctagtgatttaggattgaaaaattcacaagttgttcagtttccaataagtaatatttctagtaagaaaatcttgcacaataaatttaaatcaatagttaacactgaagaaattgatgaaaatatttctttctataaacttgtgaacaagttttcacctgaagtagcacctgaagatacagtggatttacttcagataataaaaaggaggagtaaagatggaaattttaaatgattctgtaaaaagttttgaaaaactttatttacaattacaagatggttttccagtgattgttcctactgatactaattataatttatgtagtttacctaacaacgatctttgtatcgataaaatatttgaatataaaaagcgatcgaaagataagccattatcattatttattgataagccagaggattggaaattgtatggagataatcaaaatacggaaatagttgataaactagttgaaatattttggcctggaccattaaatattattttaaaaaataaaacaagctataattatatgctcaataattcagatagtatagctataggatgtgtacaaaataaaacgatgagaagatttatttcatatattaattcacctatagcaattacttcagcaaatatatctggaactgccgatgatattttaataactgaaaatgaagcaattaagcacatgggcgaaaatgtaagatatatgctaagaagtcaaaataaaactaactataaaacatctagtacgattattaaagtgacagataataaaattgaattattaagagaaggagatataaagtttgaagaaataaaagaaagactaggtacaggtattatttatgaataagttaatacttgggatttatttataccgaattttttcacgagcatacttttatttaccgtttttattaatttactttttgattcaaggttattccataatacaattagaaatattaatggcgtcttatggcattgcagcatttttattctctctatacaaagagaagtgttttaaaatttgtaacttaaaagattctaataaattagttgttagtgaaatattcaaaatcatcggtttattgttgttattatatcaaaatcaatatttaattttagtagtggcacaaatattattagggttaagttactcaatgatggcgggtgttgataccgcaataattaaaagaaatataacaaatgagaaatacgtacaaaataagtcaaatagctatatgttcctatcattattaatttcagggattataggtagttatctttatggaataaatattaaatggcctataataatgactggtatattttcaattctaacaattataattattcgatgcacattagttgaaaatagggaattaaatttaataggagaaacaaagggaaagataaagaaatttctaccagaagagaagttttggatattgcattattcttttttaagagcgttaatattaggattttttataggatttattccaattaatatatataatgatttaaaactgaataatttacaatttatttcagtattaacttgttacacagttatgggttttgtatcttcacgttatttaactaaatacttgaattataagtttgtgtcagaaatttgtttagtaatatttttaataatatatacatatcaaagtttcatagcagttactatttctatgatatttttaggtatttcttcagggttaactcgtccacaaactataaataaactttctagcagtagtaacttaagagtgatgcttaattatgcagaaacgttatattttatttttaatatcgcatttttacttatgggtggttacttatatacaataggaactattcaatacttaatattatttatttcgttattaatttttatatatttaataataatattttattttacaaggagagagcaacatgaaaataaaaactgaatttaaagggaacaatataccatatgaatacgcagcaggtgcagatgtgagtgattctattaacgggaatccaattaagtcatttccatttgaagtaattgaattaccggaagggactaaatatcttgcttggtctttaattgactatgatgcaattcctgtatgtggctttgcttggattcattggagtgtagctaatgtaagtgttagtggcaattcaatttctataaaagcagatttatcaagaacaaagggtgactatgtacaaggtaaaaatagctttactagtgggttgttggctgaagatttttcagaaatagaaaatcactatgtaggacctacaccacctgatcaagatcatcaatatgaattaacagtttatgcgttagatcattctttaaatttgaagaatgggttctacttgaatgaatttttaaaagaagtaaatcaacataaaattgatcaaacaagtattaaccttataggaagaaaaatttaatactaaatatctcatcaatataaaattgttcaattaaaagtacaaagaaacaaaggttttaatttatatattaggtacggcgttcgctataatgcaaagaagtaattaaatttaagaaatgtaaacttagttattgtaatgtgaatttatttgaaaaaatagaaagtattaacaattatagcttttacattaattaaaatttatttttaaaaacaagtaaacaatttacatacttataatttttgaaacttttcaatttgtgttatattgattttgtaagatactttaaatcacaaaggagagagattatatgaaattaaaatcatttataactgtaactttggcactgggcatgatcgcaacgactggcgctactgtggcaggtaatgaggtatctgcagcagaaaaggacaaactaccggcaactcaaaaagctaaagaaatgcaaaatgttccatatacaattgcagtagatggcattatggcttttaatcaatcttacttaaatttaccaaaagatagccaattatcatatttagatttaggaaataaagttaaagctttgttatatgatgaacgcggtgtaacacctgagaagattcgaaatgcaaaatctgccgtttacacgattacttggaaagatggtagtaaaaaagaagtggatcttaagaaagatagctacacagcaaacttgtttgattcaaattcaattaaacaaattgatattaatgtaaaaactaaataaacacttaaaattatcaaattcaacatgaagcatttaattttacagtgatgattataaaataattgccttgatacaaagattactcgtaaatgacatctttgtattaaggctttttctaaatttaaaagtgatgggttagaggtcattgagctttaaaatattcaaaatacaaaacattaatggccaaaaataaaagccgcctttatctgggcagcttcaataataagaaagacatatttcattttatactaaatagttattgtgatgaatctttcggcggtttaattactgcagcaaaaattgctgtgaaaatcgtgaacaatactgccatgataattggattcactacatttaagctgtctccacctactaggctattaagtacaaagttaaccatttgcattaataataatgcccaaaagaatgttacgaggtgtttcatgtcattctacctccactttaattatatatattttattttaagtgaaagttagaaatttgtatagtaacatctcatatattttgaccatattatacagtttaaataaatgattttatctgaatggctattctaaattaagcgcattaaaaccaatttcatactgaaatttgacgataataaagcattaaaattttattaactagtcaatattcctacctctgacttgagtttaaaaagtaatctatgttaaattaatacctggtattaaaaattttattaagaaggtgttcaactatgaacgtgggtattaaaggttttggtgcatatgcgccagaaaagattattgacaatgcctattttgagcaatttttagatacatctgatgaatggatttctaagatgactggaattaaagaaagacattgggcagatgatgatcaagatacttcagatttagcatatgaagcaagtttaaaagcaatcgctgacgctggtattcagcccgaagatatagatatgataattgttgccacagcaactggagatatgccatttccaactgtcgcaaatatgttgcaagaacgtttagggacgggcaaagttgcctctatggatcaacttgcagcatgttctggatttatgtattcaatgattacagctaaacaatatgttcaatctggagattatcataacattttagttgtcggtgcagataaattatctaaaataacagatttaactgaccgttctactgcagttctatttggagatggtgcaggtgcggttatcatcggtgaagtttcagatggcagaggtattataagttatgaaatgggttctgatggcacaggtggtaaacatttatatttagataaagatactggtaaactgaaaatgaatggtcgagaagtatttaaatttgctgttagaattatgggtgatgcatcaacacgtgtagttgaaaaagcgaatttaacatcagatgatatagatttatttattcctcatcaagctaatattagaattatggaatcagctagagaacgcttaggtatttcaaaagacaaaatgagtgtttctgtaaataaatatggaaatacttcagctgcgtcaatacctttaagtatcgatcaagaattaaaaaatggtaaaatcaaagatgatgatacaattgttcttgtcggattcggtggcggcctaacttggggcgcaatgacaataaaatggggaaaataggaggataacgaatgagtcaaaataaaagagtagttattacaggtatgggagccctttctccaatcggtaatgatgtcaaaacaacatgggagaatgctctaaaaggcgtaaatggtatcgataaaattacacgtatcgatactgaaccttatagcgttcacttagcaggagaacttaaaaactttaatattgaagatcatatcgacaaaaaagaagcgcgtcgtatggatagatttactcaatatgcaattgtagcagctagagaggctgttaaagatgcgcaattagatatcaatgaaaatactgcagatcgaatcggtgtatggattggttctggtatcggtggtatggaaacatttgaaattgcacataaacaattaatggataaaggcccaagacgtgtgagtccatttttcgtaccaatgttaattcctgatatggcaactgggcaagtatcaattgacttaggtgcaaaaggaccaaatggtgcaacagttacagcatgtgcaacaggtacaaattcaatcggagaagcatttaaaattgtgcaacgcggtgatgcagatgcaatgattactggtggtacagaagcaccaattactcatatggcaattgctggtttcagtgcaagtcgagcgctttctacaaatgatgacattgaaacagcatgtcgtccattccaagaaggtagagatggttttgttatgggtgaaggtgctggtattttagtaattgaatctttagaatcagcacaagctcgaggtgccaatatttatgctgagatagttggctatggtactacaggtgatgcttatcatattacagcgccagctccagaaggtgaaggcggttctagagcaatgcaagcagctatggatgatgctggtattgaacctaaagatgtacaatacttaaatgcccatggtacaagtactcctgttggtgacttaaatgaagttaaagctattaaaaatacatttggtgaagcagctaaacacttaaaagttagctcaacaaaatcaatgactggtcacttacttggtgcaacaggtggaattgaagcaatcttctcagcgctttcaattaaagactctaaagtcgcaccgacaattcatgcggtaacaccagatccagaatgtgatttggatattgttccaaatgaagcgcaagaccttgatattacttatgcaatgagtaatagcttaggattcggtggacataacgcagtattagtattcaagaaatttgaagcataattataaaaatcttcagtaacgttgttttagttactgaagattttttctgtttctttatactaagatgagcgacagcacaatcgtcataataaaatataaaatatttattaataataaagggattatccatgtagaaacaaagtaatgctctttttttacctcttgtgggttgaaaaatggatcatcagagatagacttcttctttttcgaagatgacatttgatactttaatcttctaaaaccataacttgtcgcatcaaaaatgccttcttgtacaagtaaaatcaaaaatatgctaataaaaataattaatgaaacataaaacaatatatttaaatatgtaatgatagtatggctattaaaaagccatataataaacgttaatattggcgttattagtgccattccaagccattttttcaacatttgatcactcccacttatagaaaactcttacgcatagtttacattaaaatcagacattgaggaatgattttttaatttcttcagctttattgaaattctaaaatcaatcattcttcattagtttaaagcaaaaaaatattgatatatagtaaatattgtatatataatattagttaagatttcagaaaattttgaagggaatggaaatttagaaatcggaatttgttagaggaggggattagatggggaaatatattttcaaacgatttatttatatgcttatttctttatttattattattacaattacatttttcttaatgaaattaatgccaggttcgccatttaacgatgctaaattaaatgctgaacaaaaagaaattttaaatgaaaaatatggattaaatgatcctgtagctacgcagtatttacattatttaaaaaatgttgttacaggcgattttggtaattcattccagtatcataatcaacctgtgtgggatttgattaaaccgagactactaccttcttttgaaatgggtcttacagcaatgttcatcggtgtgatactgggacttattttaggtgttgcagcagctactaaacaaaattcttgggttgactatacaactacagttatttcagttattgcagtatctgtaccatcttttgtacttgctgtacttttacaatatgtatttgcagttaaattaagatggttcccagtagctggatgggaaggtttttcgaccgcggtattaccgtcacttgcattatctgcagctgttttagcaactgtcgccagatacataagagcagagatgatagaggtattaagttcagactatattttattagcgagagctaaaggtaattcgacaatgcgtgtactttttggacatgcacttagaaatgctttaattccaattattacaattatcgttcccatgttagcaagtattttaacaggcactttaacaattgaaaatatttttggggttcctggattaggggatcaattcgtacgttcaattacaacaaatgatttctcagtaatcatggcaatcacactattatttagcacactgtttatcgtttctatttttattgtagatattttgtacggtgtgatagatccacgaattcgtgttcaaggaggtaaaaaataatggctgaaaataaaaacaatttgtcgattaacgacgatcattctaatgcagctatgacgcatacctctgacgctatctcatcatctgattttattattagagaattagatttgaatcaggaacctgaaatgcaacgagaaagcaaaaacttttggcaagatgcttgggctcagttaaaacgaaataagttagctgttgtcggtatgataggtttaattatcattgtaatatttgcttttatcggtccagttataaataaacatgattatgctgaacaaaatgtagaacatagaaatcttccggcaaaaatacctgtattagacaaagttccatttttaccttttgatggtaaagatgcagatggcaaggatgcttataaagcagcaaatgctaaagaaaattattggtttggtactgatcagttgggtcgagatttatggacaagaacatggaaaggtgctcaaatttcattgtttatcggtgttgttgcagcgatgttagatatttttattggcgttgtatatggtgcgatttctggattcttcggtggacgtgtcgatacgattatgcaacgtatacttgaagtcatagcatctattccgaatttaattgtcgtaattttatttgtattaatttttgaaccatccatttggacaattatattggctatgtctatcacaggctggttaggcatgagcagagttgtacgtggagaatttttaaaattaaaaaatcaagagtttgtcatggcttcgaaaacattgggggcttcaaaattcaaattgatatttaagcatattttacctaatacattaggtgctatcgtggttacatcaatgtttacagtacctagtgctattttcttcgaagcatttttaagtttcattggtataggtgtacccgcacctcaaacatcgttagggtcattagtaaatgatgggcgagcaatgttattaatttatccacatgaattatttataccagcaatgattttaagtttattaattctattcttttacttatttagtgatggattacgtgatgcatttgatccgaaaatgcgtaaataaaagggggcatagcatatgactgaaagaatattagaagtaaatgatttgcatgtttcctttgatattacagcaggggaagtgcaggcagtgagaggtgtagatttttatttaaacaagggggaaacattggcaattgttggtgaatcaggttcaggtaaatctgtaacaacaaaagcaattacaaaattattccaaggggacacaggaagaattaaaaagggagaaattttatttttaggggaagatttagcaaaaaaacctgaaaatgagttaattaaattacgtggcaaagatatttcaatgatctttcaagatccaatgacatctttaaacccaactatgcaaattggtaaacaagtcatggaaccattaattaagcacaaaaattatagtaaagcacaagctaaaaagcgcgcattggaaatactaaatcttgtaggtttaccaaatgcagaaaaaagatttaaagcatatccacatcaattttcaggtggacaaaggcaaagaattgttattgcaaccgcattagcttgtgaacctaaagtgctcattgctgatgaaccaacgactgcattagacgtaacgatgcaggcacaaattttagatttaatgaaagaactacaacaaaaaatcgatactgcaattatttttataacgcatgatttaggggttgttgcgaatattgctgatagagtggcagttatgtatggtggtcaaatggttgaaacaggagatgttaacgaaatattttatgatccaaagcatccatatacatggggattattatcgtcaatgcctgatttatcaacaacaaatgacacaccattactagcgattcctggagcgccacctgatttattacacccacctaaaggtgatgcatttgcgagacgtagtcaatatgcattagatattgattttaaagtagaaccaccgtggtttaaagtttcaccgacacattttgtgaaatcttggttattagacgcacgtgcaccaaaagttgaactacccgagctggtaaaacaacgtatgaaaccgatgcctaataattatgaaaaaccactcaaggtagaaagggtgtcgttcaatgaaaaatgatgaagtgctattatccattaaaaatttaaagcaatattttaacgcaggaaagaaaaacgaagtgagagcgattgaaaatatttcgtttgatatatacaaaggggaaacattaggtttagtaggagaatcggggtgtggtaaatctacaactggtaaatcaattattaaacttaatgatattacaagtggagaaattttgtatgagggtattgatatacaaaagattcgtaaacgtaaagatttgcttaaatttaataaaaagatacagatgatttttcaagacccatatgcgtctttaaatcctaggttaaaagtaatggatatagtagctgaaggtattgatatccatcatttagcaactgataaacgtgaccgtaaaaaacgtgtctatgatttacttgaaactgttggattaagtaaagaacatgccaatcgctatcctcatgaattttcaggtggacaacgccaacgtattggaattgcccgtgcattagccgttgaaccagaatttattatcgcggacgaaccaatatcggcattggatgtttcaatccaagctcaagtagttaatttattattaaaattacaacgtgaaagagggattacgttcctatttatagctcatgatctatcaatggtgaagtatatttcagatcgtattgcagtgatgcattttgggaaaatagttgaaattggaccggcagaagaaatttatcaaaatccattacacgattatactaagtctttattatcagccattccacaacctgatcctgaatcagaacgcagtcgcaaacgatttagttatattcatgatgaagcaaataatcatttaagacaattacatgaaataagaccacagcattttgtctttagtactgaagaagaagcggcacaactacgagaaaataaattggtgacacaaaattaaggggaagggggaaatgcaatgacgagaaaatttagaacacttattttaattttgattgctacaattgcattaagtggttgtgctaatgatgatggtatttattcagataaaggtcaagtattcagaaaaattttgtcatcagacttaacatcccttgatacatcattaataacggatgaaatatcttctgaagtgactgcgcaaacattcgaaggtttatacacattaggaaaaggtgacaaaccggtgttaggtgttgcgaaagcttttcctgaaaagagtaaaggtggtaaaactttaaaggttaaattaagaagcgatgctaaatggagcaatggtgacaaagtgactgcgcaagattttgtttatgcttggagaaaaacagttgaccctaaaacaggttctgaatttgcatacattatgggggacattaaaaatgcgagtgatattagtactggtaagaaacctgtagagcaattaggtatcaaagcattagatgatgaaacattacaaattgatttagaaaagccggttccatatattaatcaattattagcacttaatacctttgcacctcaaaatgaaaaagttgccaaaaaatatggtaaaaattacggtacggcagctgatagagcggtatacaatggtccatttaaagttgatgattggaaacaagaagataaaacgttactatctaaaaatcagtattattgggataaaaagaatgtaaaattagataaagtgaattataaagttattaaagacttacaagccggtgcatcattgtatgatactgaatcagtagatgacgcagttattactgcagatcaagtaaataaatataaagataacaaaggattaaactttgtgttaacgactgggacattttttgtaaaaatgaatgaaaaacaatatcctgattttaaaaacaaaaatttaagactggctatcgcacaagcaatagataaaaaaggatacgttgattcagtgaaaaacaatggctcaattccttccgatacactaacagccaaaggaattgcgaaagcgcctaatggcaaagattatgcgagtaccatgaattcgcctttaaaatataatcctaaagaagcaagagcacactgggacaaagctaaaaaagagttaggtaaaaatgaagtgacattttcaatgaacacagaagatacaccagatgcaaaaatatctgctgaatatatcaaatcgcaagttgagaaaaatttaccaggagttactttgaaaattaagcaattaccgtttaaacaaagagtatcactagaactgagtaacaattttgaagcatcacttagtggttggtctgcagattaccctgatcctatggcttatttagaaacaatgaccacaggtagcgcacaaaataatacagactggggtaataaagaatatgatcaattacttaaagtagcaagaaccaaattggcacttcaaccgaacgaacgatatgaaaacttgaaaaaagcagaagaaatgttcctaggagatgcaccggtagcaccaatttatcaaaaaggtgttgcacatttaacaaatcctcaagtaaaaggattaatttaccataaatttggtccaaataactcacttaaacatgtatatattgataaatcgatagataaagaaacaggtaagaagaaaaaataatatgctttgtaaattaggctggagacatatctccagtctttttgtgttggataaaaactttgggaataaaaatttaaaataagtcgttttttaaattactgaaattgattaaatgcataaataactgaatattctaaaaataaacttgtaataattttttctatgagtaaactaaaaagaaaaaattagattgaaagtaggaggcatatgtatggggaagcttattaaatatatttcaatacttcttattgtcgttttagtgttgagcgcttgcggaaaaagcagtaataaagatgaaggagtaaaagatgctactaaaacagaagcgtcaaaacataaaggtggtacgctaaatgtagcgttaacagcaccgccaagtggtgtttattcttcgttattaaatagtacacatgcggatgctgtagttgaaggatattttaatgaaaacttattaacaattgataaaaaaatacgtcctaaatcatatattgcttcatggaaggacatcgagccggctaagaaaatagaatttaaaattaaaaaaggtattaaatggcatgatggtaatgaattgaaaattgatgattggatttattcaattgaagtcttagctaacaaggattacgaaggtgcttattatccaagtgtagaaaatatccaaggtgcaaaagattatcatgaaggaaaagctgatcatattagcggattgaagaaaatagatgactacacaatgcaggttacatttgataaaaagcaagaaaattacttaacaggatttattactggacctttattaagtaaaaaatatttatcagatgtaccaattaaagatttagcgaaatcagataaaatccgaaaatatcctattggtattggaccatataaagttaagaaaatcgtcccaggtgaggctgttcaacttgttaaatttgatgattattggcaaggtaagcctgcattagacaaaatcaatttaaaagttattgatcaagctcaaattattaaggcaatggaaaaaggcgatattgatgttacgaatgatgctaccggtgcaatggcaaaagatgctaagtcatctaatgctggtctcaaggtattatctgcgccaagcttagactacggtttaataggattcgtatctcatgattacgataaaaaagctaataaaactggtaaagtgagaccaaaatatgaagacaaagaattacgtaaagcaatgctttatgcaattgatagagaaaaatggatcaaagcatttttcaatggttacgctagtgaaataaatagttttgtaccatcaatgcattggatagcagctgatcctaaggaactaaacgattataaatatgatcctgaaaaagctaaaaaaatcttagataagttaggttataaagatcgagatggtgacggatttagagaagatcctaaaggtaataaatttgagattaactttaaacattattcaggttcaaatcctacttttgaaccaagaactgctgcgataaaagatttctgggaaaaagttggcttgaaaacaaatgtgaagttagtagaattcggtaaatataatgaagacttagcaaatgcatcaaaagatatggaagtgtacttcagatcatgggcaggtggtacagatccagacccatcagatttataccacactgatagacctcaaaatgaaatgagaacagttttaccaaaatcagatcaatatttagatgatgcgttagacttcgataaagtaggcattgatgaaaagaaacgtaaagatatttatgttaaatggcaaaaatatatgaatgatgagttacctggattaccaatgttccaaggtaaatcgataactatagttaatgataaagtacgaaacttagacattgaaattggaactgatcaaagtttatataatttaactaaagaagcttagtaatgtaacctcgacgattttgtcgaggtttacttatatggggggatgttatgaataatgtattgttagaggttaaagatttagaaacatcattaaaaataaataatgaatggttagcaactgttgaaaatatttcttttgaattatctaaaggagaagttttgggtatagtaggggaatctggttgcggtaagtccatattaagtaagtcaattattaaattattaccagaaaagatatctaaactaagtaatggagaagttatatttgatggtaaacgaatcgatacgctcaatgagaagcaattgctagatattcgaggaaatgatattgctatgatttttcaagaacctatgactgctttaaatcctgtatttaccataaaaaatcaacttgtggaatctataaaatcacataaaaaaatttctaaaaaagaagcaaataacttagcaaaagatttactaaaaaaagttggaattgctagacaagatgaaatattaaatagctatcctcatcaattatctggtggtatgagacaaagagtaatgattgcaatggccatttcatgttctcctaaattattaattgctgatgaacctacaacagcattggatgtcacgattcaagcgcaaatattagacttattaaaagaattgcaaaaggaaacgcaaatggcaattatgatgattacacatgatttgagtgtagttgctgagttttgcgataaagtcttagttatgtatgcaggtcaaattgtagaatttggaggcataaaagaaatactacacaatccgaaacatccttatacccaaaaattattatcaacaattccaaaacttaaagaagagcagaaacgacttgaaacgatagaaggaattgtgccatcaatccaagcatttcacgttaataagtgcagatttgcaaatagatgtaacaaaaaaatggatatttgtaataatcaatctcctaaaatgcatgtttgtgaagacgtcattgtacgttgtcatttgtacaaaaatgaatataaggagatataagaatggaaaatattttagaagtcaaccaaataaaaaaatactacaaaattaaaactggattattacaaaaaactcagtacgttaaagctgttgatgacgtatcgttttcaataaaaaaaggacaaacttttggattagtaggagaatcgggttgtggtaagtcaacgttaggtaaagtgattatcaggcttgaagatgcaacttcaggctcaataattgttaatggtgaagatataacaagattacaaggtaaaaaactcagaaaatcacgacaacaatatcagatgatatttcaagatccgtatgcatcattgaatccgatgcaaatggttggagatatcatttcagaacctattttaaattataaaaaattgccaaaagaagaaataaaaaaagaagtactatatttattaaaatgtgttggcctaagtgaagatgcatattataaatatgcacatgaattttcaggtggacagagacaaagagtgggaattgcaagagcattggctttgcgtccgagtttaattgttgctgatgagcctgtaagtgcattagatgtatctgttcaatctcaagtactgaatttattaaaagatttacaagaacaatttaacttaagctatttatttatcgcacatgatttaagtgtagtaaaacatataagtgatgtcattggagttatgtatttaggtcatatagttgaaatcgcatctgataaagaaatttatgaaaatcccaaacatccatatacaaaagcgttgatttcatcaataccacaaattgataaacataataacaatagaattatattaaaaggagaattaccttcgccaagtaatccgccgcaaggttgtccttttcatacaagatgtccgattgcaaaagataaatgtaaagaaaatataccacaattaaaggacattggtgatgaacatcaagttgcttgtttttatgtaaataaagtaggtgatttaaatggttaaattaatattaaagagattaggtttaatgattccgttactaattttaatttctattgttgtattttcattagctatcattcaaccaggagatccattttcagatttacaaaacggaaaaataaaacaagaagcgataaatgcacaaagggaaaagttaggcctcaacgactctatatcacatcaatacattagatgggtcaatcatgttatacatggtgatttaggggagtcaatcaaatataaaaggccggtaattgatgttattgaggaaagaattccaaatacaatattactcggtgctatgtcattaattattacttatattatctcatttgctttaggaataacgtcaggtagatattcttacagtttgactgattatactgtgcaaatatttaattatttgatgttagctattccatcttttattgcgggagtatttgcaatttttattttttcttttgaattacaatggtttccgtttcaaggttctgttgatattaaccttaaagaaggtacttttgaatattatatgagtaaaatttatcatacatttttgcctgcattaactttaggattattatctactgctggttatattcaatatttacgtaatgatattattgaaaattctaaaaaagattatgtattgacggcaaggtcaaaaggattatctatgaataaaatttataataaacatatattgagaaattctttaatacctattattacatttttaggtgctgatattgtaagtattttaggtggagctgtgattactgagactatcttttcatataacggtatcggtaaattatttttagaatcggtaataggtcaagactatccattaatgatggcattaacgttgtttttctcatttttaggtttactgggtaatttgatttctgatattacttatggatttatagatccaagaattagaagtaactaggggggattggaatgcaaaataagtcaaaatcgccttttaaaattgcattgtctagatttattcataataaaattgcaatgttatcgattatttttttattaatcataactattatatcaattatagcgccattaatagctccttttccagtgaaccaacaagatttattaaatataaaaggtgaaatgacagcacaaaacattcttggtacagactctggtggtagggataactttagtcgtttgttatatgcaggtcgtatttcattatccattggaattacatctacaataggaatgcttttgattggaattacagttggagtgatttctggttattttggaggtattgttgatacattattaatgagaataaccgaatttgttatgttatttccatttttaatatttgcaattgtattaaatgctgcacttggagataaaattaaaaatccttatggatctgccataattcttgttctagttattatcgtattaagttggggaggtattgcaagacttgttcgtggtaaagtacttcaagaaaaagaaaatgaatactttttggcagcaaaatcaattggtacacccacatataaaattattttgaaacatcttttgccgaatatattaagtgtagttatcgtacaagcaacattgttatttgccggtatgattgtagtggaatcaggattgagctttttaggattcggaattagtaaagcaataccatcttggggtaatatgttgagtgatgctcaagaaggggatgttataagtggtaaaccgtggatatggatgccacctgctataatgattacattaactatattaagtataaactttgtaggggaagggcttaaagatgcttttaatcctagaggtagacgttaaataataaaagaggcactagttaattctagtacctctttattttatctcttacgtcctaaacccatcgctttttccatttttttgacagttttaaatgaaactttgtgtgctttatctctaccttgatctaaaatatcatcaagtttatctgagttatagaaactttcgtatttttcttggaattctactaaaaatgctttaactatttcagcaaggtcacctttaaatttaccataaccttcgccctcatattttgcctcaatatctttaattggcatgtctgttaatccagcgtatattgaaattaaatttgttatacctggcttgttgtcacgatcaaatttaataataccatctgaatcagttactgcgcttttaatttttttagctgcaacattcggctcgtctaataatgaaatgaagtttttagcattatcatcactcttactcatttttcttgttgggtcttgtaaactcatgacacgtccaccaactttaggcatacgaatttcaggtttcacaagcacatcattatagcgactattaaatctatctacaaggttacgagtcaattcgatatgctgcttttggtcatctccaactggaacgatattagtattgtaaagaacaatatcagctgccattaaaggtggatatgttaatagaccagcaggtataccttcaactgctttctgagctttatctttgtattgcgtcatacgctctaattctccaacagaagcaatcgtagttaacatccatcctgcttgtacgtgtgcagggacttcagattgtatgaacaatgttgctttgtctggatctataccagaagctaaataaatcgctgctaattgtctggtctgtttacgtaattttaaacgatcttgtggcattgtaattgcatgttgatctacgatacagaaataacaatcatagtcattttgcacatcaacaaattgttttagtgcgccaatataatttccaatagtaggaattccactaggttggatgcctgaaaataatgtctccatttaaatgcctactttcttagtaatattttaataattatcattataacagtatttcttaaaaatgtaagatgtgttagaatatacgtataacttactactaacaaagggattaataatcttttttataagtgtagaaacttatctgaaaaattaggtttttctcatttaattttaatgttagatagttataataaatagtaacgattaagaattttagaaaaaaatgttttttcttgatctataactaaattttaagcaatgaattttattcattcaaataggagagtgagatgtatggtaacattatttacttcaccaagttgcacatcttgccgtaaagcgaaagcatggttacaagaacatgacattccgtatacggagcgtaatattttttctgaacatttaacaattgatgaaattaagcaaatattaaaaatgactgaagacggtactgatgaaatcatttctacacgttctaaaacataccaaaaattaaatgttgatattgattcactaccattacaagacttatattcaatcattcaagataatcctggcttattacgtcgtccaattattttagataataaacgactacaagttggttataatgaggacgagattcgacgtttcttacctagaaaagttcgtacgttccaattacaagaagcacaacgtatggttgactaataaccatttaactatgtgtcatactttactaaaagatatgtcaagcaacactatttctatagtgttgcttttttggttttaattttacaataattgcttagtatcttttaaatcaaatgtgcaattgttaatatagctctatattagagtgttttggatgaaacatttgctatgataaggtaaaattaaattaagaaagtgctttaatgctttaactgtataaatcatttaaatagttttgctacaacgaatatgttattataagttaccaaaatattttagagaaagaaatcaaacaaataaattgtattttgtttgatgctttaatacaatgtggatactattcatcgactgtaaggagtgagatgatatgagaatagaacgagtagatgatacaactgtaaaattgtttataacatatagcgatatcgaggcccgtggatttagtcgtgaagatttatggacaaatcgcaaacgtggcgaagaattcttttggtcaatgatggatgaaattaacgaagaagaagattttgttgtagaaggtccattatggattcaagtacatgcctttgaaaaaggtgtcgaagtcacaatttctaaatctaaaaatgaagatatgatgaatatgtctgatgatgatgcaactgatcaatttgatgaacaagttcaagaattgttagctcaaacattagaaggtgaagatcaattagaagaattattcgagcaacgaacaaaagaaaaagaagctcaaggttctaaacgtcaaaagtcttcagcacgtaaaaatacaagaacaattattgtgaaatttaacgatttagaagatgttattaattatgcatatcatagcaatccaataactacagagtttgaagatttgttatatatggttgatggtacttattattatgctgtacattttgatagtcatgttgatcaagaagtcattaatgatagttacagtcaattgcttgaatttgcttatccaacagacagaacagaagtttatttaaatgactatgctaaaataattatgagtcataacgtaacagctcaagttcgacgttattttccagagacaactgaataacgatattaattaagcaacgcactatgaaaggagactctttggagtctctttttttattgatttcaaaagctgaaaaagtaatagtagttaaacttacgtgtaatattttgaggtgaagatatgttagtagctttaaatgaagaaaaggaacgtgtgttagcaactactgcattgagaaagacacaatatttttgtccggtgtgtggcaagcaagttattttaaagcgtgggctcaaagtaattagtcattttgcacataaacatttagcggaacaaaaatgttttaataatgaaacgattaaacattataaaagtaaattgattttagcacagatgatacagcaacaaggatttaaagtagagatagagccatttttaaaagaaataaaacaaattccggatattttgattaataataaatatgttattgagctacagtattcgccaattccttataaacagattcttcaacgaacggaaggtttaaagaaaatgggatataaagtaagttggttattaaatgatgttgattattgtcataataaagtgaagttcaatcattttcaaagtatgtttattaatccattcactcgaaaacttcatacgttcaatttagagaaaaaacaaataatgatgtttcaacaaatacaatatttaggcgggcacaaatatgtcgctgaaaaaagaaatgccaaaattagtgagttgtttaatgaggcgccttgtgattatcatgctgtttataaattatcaaagttcgcaattaatcaatatatcaaatattgtcgctggcaaaattctgttttagaacccactttaagtgcaatgtatcaattacagttaactgatcaagaagtagtgcacaattatggttatatttttccagagcaaatttatattaaaaatcatcctattgagtggcaattacaagttgatttatggttaaagaatggaaaaagcaaattagtaaatgacaatcttaattattttaaactgaaaaagtttattgttggtctagaaagtaaaacagcaattatagaaaaacttattaacaattatttaaatatttgttcagatagaggtaatgacgtgcaaattttgttctaaaatgagaaaattatatcaattatattttattaggaggtttactacatatgagtcaacaattatctagagaagaacaggaacgtaaatatcctgaatatacatgggacttaacaacaattttcaaagatgatgaagcttttgaggctgcatttaaagaagttgaaaatgagttaggcaaagaagaacaatttaaaggacacattggtgatagtgctgagacattatacaatgcattagaattagaagatacattaggtactaaattagaaaaagtatatgtatacgcgcacctaaaacaagaccaagatacaacgaacgacaagtatactggtatggagtcaagagcacatcaattaattattaaatttagctcggcatggagtttcttagtgccagagattttacaaattgatgaagataaaattcaatcatttgtaaattcatatgataaattacaaaaattcgcatttgatttgaagttgattaatgaaaaacgtcctcatattttagatgctgaaactgaaaagttattaacagaagcgcaggacgcgttatcaacgccatcaaatgtatacggtatgtttagcaacgctgatttagtatttgaagatgcgattgataaagatggaaatgcacacccgttaacacaaggtacatttattaagtatttagaatcagatgatcgcaaactaagagaaagtgcttttagaaatgtatataaagcatatggtgctcataataatacgcttggcgctacgctagcaggtgaagtgaagaaaaatgtatttaatgctcgtacacacaattacaaaactgcaagagaaaaagcattgagtaataatcatattccagaaaatgtatatgacaatctagtaaaaactgtacataaatatttaccattgctacatagatatactgaattgcgcaaagaattgctaggtttagatgacttgaaaatgtatgatttatatacaccattaattaaagatattaagtttgaaatgccttatgaagaagctaaagagtggatgttaaaagctttagaaccaatgggtgaagaatatttaaatgtagttaaagaaggcttaaacaatcgttgggtcgatgtctatgagaataaaggtaaacgttcaggtggctattcatcaggtgcacatttaactaatccatttattctacttaactggtctaatactatttcagacttatacacattagttcatgaatttgggcattcagcacatagttacttcagtagaaaattccaaccgtcaaattctagtgactacactatttttgtcgctgaagttgcatcaacttgtaacgaagcacttttaagtgattatatggataaacatcttgatgatgaaaaacgcttattattattaaaccaagaattagaacgtttcagagctacattattccgacaaacaatgttcgcagaatttgagcataaaattcatgcaattgaagaagcaggtgaacctttaacaccaactagaatgaatgaagaatatgccaaattaaataaattatacttcggtgattctgtagaaactgatgaagatattagtaaggaatggtcacgtattccacacttctatatgaattattatgtatatcaatacgcaactggttacagtgcagctcaaagcttaagtcatcaaattttaacagaaggtaagccagcagtagatagatatattaatgaattcttgaaaaaaggtagctcaaattatccaattgagatattaaaaaatgctggtgtagatatgacaacacctgaaccaattgaacaagcttgtgaagtttttgaacaaaaattgaacgcttttgaaaaattaatgaaagcttagtactattgtattcgcttacattatgaacagattgtgacaatttaaattaagtactattaaaaggttgaaatggtagagatagcatgttatattatgaacatgaaattaatcacataacaaacatacccctttgtttgaagtgaaaaatttctcccatcccctttgtttagcgtcgtgtattcagacacgacgtttttttatgttcttttttaataagagggaagtgaagttgtataaaaatgtattaaatatgcactttttatacattaacgattaatataagtctattatgtaccaaatttataatttgtataattttcgaactggttaaattcggaaaatatcactaatatatttagatcgatgtgtaacattacgttctaataatttaatgttgcaaaattaagagtcagtaaaaagacctcgttacatttatggtgtacgaggtctttaatttatttattttgatttgattttaggcattttagatttccagaaatcgccatctggatatttaagtttttcaattttttgttgaatggctaacttctttaactctttgtttaaaagtttttctggccattcataaatagtaagtaattcttccatcgttacaagttgttgttgctgtatataagtttctaatttaggaggaagattcttttcgataggtttacccatcaattcattaattatataagtatagatgtgatatgggtataatccttcgacttttaaaccttcttcatgaacatcttcactaaagaaaacgagagaaggggcttgttcgatttccatttctcttgcaatatgcaaatcaattttcaagctttcggttagtttacttttttgtaagtcgtctttaaatacttctaaatcaatacctgcattttgaatacagtcacaaatcattgattctgtaataatatctcttttaggtatgatttcattttgcattaaatgtataaatcgttcggcacgtacacgaccttgtaactcagctgctttataagctagggcgatgttatcaaagttggatgtactttgagcttggcatttcgttaatacttttaacgaaggatttaatatatgtctgatacgtatatattgattatattcaattcttaatttggataagattgctgataatttgaagcaatcggagctaaatggatcgaaaaatgaataaatttcgattttacttacaggtgatagattaatatcttcacgactcttattttccattattcgtaattctccagccatgtttattcacctacaattaattttaggaattcaccatatgattagcagttaatcttaagcgctcaaataaataatctccaacaccttgtggaaacgcagcgcgattaattgctgtctgcatattttctaaccatgcatctctttcaaattcagtgattgtaaaatccatatgtctttttcttagcataggatgtccgtgttcttcggtataaatgtttggaccgcccaaaaactgtgttaaaaattgtttttgtttacgacttgtttctgcaaaatctcctggaaacaggtgattaagtcgttcatctttttctacaagggtgtaaaaataatcaatcatatcgtataacgcttctttaccaatgatgtcatatggtgttgttgtcatttaatcacccattttcaaaaatttactgttacgaacttaagttaatatataactaatataacatgattttaaacatttgaaagaaatatgcatatttgccaatttaatttatattgtttgaaagtgtttcttttttcttgaaaaaacgttgaactttatttaaaggttgatgatgttcgaggtttagttcgtttaataaagattggaacttttgtaaaccttgattatagtctttaacttcgaactctaactcataatccgtagtatcgaaatactcacttttatctaaaacgagtaaatcacctttatatttagtttcttggcgatatgtcgttaatgcaccaagtattgataaagttgtatcctttacaccaaactgttcaactataatttgacgaatgtcatctggaagattgtcgtttgaaataatcaagttcatctctggtttaatgtcgacgatatagttgtattctaatagaccaacctttgctggtgtctttaaagtcatttcatattgattgtctttaactcttatgcgtagtgcagagcgatgttcctttaatttgaaatcgggtgtatcaatatagtaattgatttgcttaaaaagcacactgtctttaaaatatttctcttgcaatttattatagattgatgcagttatcatttgtttaaattctatttcatgatttgttgccatgatatgtatacacctcgtatcaaattcaatttatcttaactatattatgaatgacaaagttgaattttaaaagcaatttcctttatctattatcaatgttaatttgaccattaaaaatagtgttcgtaagtgttttgtattattgaattgtgttaaaatgttatggaataagaggaggattaagcatgcgtttatatattaatgaaattaaaattaaagatgacatactttattgttatacagaagattctattaaaggattatctgaagtaggacaaatgctcgttgatagtgataattatgcctttgcgtatacattagatgatggtaaagcgtatgcttatctcattttcgtacaagaaacatggacgatgttgcatgaaaacatgactaaaaaaattattatcaatgatgaactagaattgactgaattccaccaagaacttacttatattttagacaacataaaagggaataataattatggtaaggaatttgttgcaaccgttgaagaaacattcgacattgaataaagcggggtgaagcactatgaatcaatgggatcagttcttaacaccttataagcaagcggttgatgagttgaaagtgaaacttaaaggcatgcgcaaacaatatgaagttggtgaacaagcgtcgccaatagaatttgttactggtcgtgttaaaccaatcgctagtattatagataaggcaaacaaacgacaaataccatttgataggttaagagaagaaatgtacgatatcgctggtttaagaatgatgtgccaatttgttgaagatattgatgttgtcgtcaatattttaagacaaagaaaagattttaaagtaattgaagaacgagattatattcgtaacactaaagaaagtggttaccgctcgtatcatgtcattattgaatatccaattgaaacattacaaggccaaaaatttatattggctgagattcagattcgtacattagcaatgaatttctgggcaacgattgaacatactttacgatataaatatgatggtgcttatccggatgaaattcaacatcgtttggaaagagcggcagaagcagcgtatttacttgatgaagagatgtctgaaattaaagatgaaattcaggaagctcaaaaatattacacgcaaaaacgttctaaaaaacatgaaaatgattaacgaggtgttataaatcatgcgttatacaattttaactaaaggtgactccaagtctaatgccttaaagcataaaatgatgaactatatgaaagattttcgcatgattgaggatagtgaaaatcctgaaattgttatttcagttggtggtgatggtacattactacaagcattccatcagtatagccacatgttatcaaaagtggcatttgttggagttcatacaggtcatttaggattttatgcggattggttacctcatgaagttgaaaaattaatcatcgaaattaataattcagagtttcaggtcattgaatatccattgcttgaaattattatgagatacaacgacaacggctatgaaacaaggtatttagcattaaatgaagcaacgatgaaaactgaaaatggctcaacacttgttgtggatgttaacttaagagggaaacactttgagcgatttagaggcgatggattatgtgtatcaacaccttcgggttcaacggcttataacaaagcgctaggtggcgcactgatacatccttcacttgaagcaatgcaaattacagaaattgcctcaataaataatcgtgtgtttagaacggtaggatcaccacttgtattaccaaagcatcatacatgtttaatatcaccagttaatcatgataccattagaatgacgatagatcatgttagtatcaaacataaaaatgttaattcaatacaataccgtgtagcaaatgaaaaagtgaggtttgcacgttttagaccattcccattctggaaacgtgtacacgattctttcatatcaagtgatgaagaacgatgaaatttaagtatcatatatcacaacaggaaactgttaaaacttttttagcacgacatgatttttctaagaagacagtgagcgccattaaaaataatggcgctttaattgttaatgatgaaccagtcacagtgcgtaagcaattaatgccaaatgatatattagaaattcatttaccacgagaaataccgagtgttaatttaataccttatgctcgtaagctagaagtattgtatgaagatgcttttatcatcatagttactaaaccaaacaatcaaaattgtacaccttcgagagaacatcctcatgaaagtttaatcgaacaagtactatatcattgtcaggaaaatggtgaaaatattaacccacatattgttacgcgtctagatcgtaatacaactggtattgtgatattcgctaaatatggatatatccatcatttattttctaaagtaaacttgaaaaaaatatatacttgccttgtatatggtaaaacccatacatctggtattattgaagctaatattagacggtcaaaggatagtattataactagagaagttgcctcggatggtaaatacgctaaaacatcttatgaagtaataaatcagaatgataaatacagtttatgcaaagttcatttgcatacgggacgtacacatcaaattcgtgtacattttcaacatattgggcatccaattgtgggagattctttgtatgatggttttcatgacaaaattcatggtcaagtactgcaatgtacgcaaatatattttgttcatccaatcaataagaacaatatttatattacaattgattataagcaattacttaaattattcaatcaactctaattcacacagggggtgtaagtatgtcaatgaacacagatgaaaaagagcgtgttcaagaggaattatatgatgagacattattagatcaatacttagaaaatgatgatattgatcaatttagagatgaatttctagcattacacacatatgaacaaagtgagtattttgaagatactaccgatgaaaatagacaaaagatttttcaatatttatcacctgaagaggttgcaaatttctttgatcaattagatattgatgacgatgaatatgagttgctatttgataaaatgaatgcgacatacgcaagtcacatattagaagaaatgtcatacgataatgcagtagatattttaaatgagttgactaaaccaaaagttgctagtcttttaacattgatgaataaagatgacgcgaatgaaatcaaagcattacttcactatgatgaggatacggccggcggtattatgacgacggagtatttatcacttaaagcgcatacgcctgttaaagaagcattattattggtcaaagcgcaagcaccagacgcagaaacaatatatgttatatttgtcgttgatgatgatggtaaattagtaggtgttttatcgctaagagatttaattgtagctgaaaatgatgcttatattgaagatattatgaatgaacgtgtcattagtgtgaatgtagcagacgaccaagaagatgttgctcaagttatgagagactatgatttcatggctgtacctgttatagattaccaagaacatttgcttggtatcatcacgattgatgatattttagacgttatggatgaagaggctagtgaagactactctcgtttagccggggtatcagatatcgattcgactaatgattcaatcattaaaacagcattaaaacgtttaccatggttgattattttaacatttttaggaatgattactgcgacaattttagggagattcgaaaaaacattagaaaatgtagcgctactcgcagcgtttattcctattattagtggtatgtcaggaaattcaggtacacaatctttagccgtttcagttcgtaacattacgacaggggaaattaatgagcaaagtaaatttagaattgcattaagagaagcaggaagtggtgtattatcgggtgttgtatgttcaacaatattatttacaattattgttgcaatatatcatcagccacttttagcattaatcgttgcaggaagtttaacttgtgcgatgacggtggggacgtttgtaggttcgatgattccattattgatgaataaattaaatatcgatccagcagtggctagtggaccatttattacaacaattaatgatattattagtatgttgatttattttggtttagctacatcatttatggcttacttaatttaaggaggagttatggagtttttatctttagttattgttgttttagcagcgtttttaactccaataattgtcaatcgattaaatattaatttcttgccagttgttgttgcagaaattttgatggggattgtgattggaaattcatttctaaatatagtagaaagggattcaattctaaatattttatcaacattaggctttatctttttaatgtttttaagtggtttagaaattgattttaaagcttttaaaaaagataaacgcgcacgtcaaggacaaaataatgatgaatcctcaattccagggcatcttaatctagcgttaactgtatttgcatttattatgattatttcgattcttttagcgtatgtatttaaatggcttggattagtggatgatgtgttattaatggtcattatcatttcaactatttccttaggcgtagttgttccaactttaaaagaaatgaatattatgagaacaactatagggcaatttatcctattagtagcagtacttgcggacttagtaactatgattttattaacggtctatggtgcaatcaatggtcaaggcggcagtacaatatggttaataggtatattagttgttttcacagcaatttcatatattttaggtgttcaatttaaaagaatgtcatttttacaaaaattgatggatggtacgacgcaaatcggtattcgtgcggtatttgcattaataatattattagtagccctagcagagggagttggcgcagaaaatatattaggtgcattcttagcaggtgtcgttgtttcattattaaatccagatgaagaaatggttgaaaagttagactcatttggttatgggttctttattcctattttctttataatggttggtgtagatttaaacataccttcattaattaaagaaccgaaattactaattatcataccgattttaatcgttgcatttatcgtttcaaaattaattccagtcatgtttattcgacgttggtttgatatgaaaacaacgattgcatcagcatttttattaacatcaacattatcgctcgtgatagctgcagccaaaatttcagaaagattaaatgctatttcagctgaaacgtcaggtatattaattttaagcgcagtcattacatgtgtattcgttccgattattttcaaaaaactgtttccagttccagatgagtttaaccgtaaaattgaagttagtttaattggtaaaaatcaattaacgattcctatagcgcaaaatttaacatctcagttatatgacgtgacattatattatcgcaaagacttgagtgatcgtcgtcaattgtcggatgatatcacgatgatagaaattgctgattatgaacaagatgttttagaacgactaggtctgtttgaccgagacatagttgtttgtgccacgaatgacgatgatattaaccgaaaagttgctaaattagccaaagcacatcaagttgagcgtgtcatttgcagacttgaaagcacaacggacgatacagagttagttgattcaggtattgaaattttcagtagctacttaagtaataaaatcttattaaaaggtttaattgaaacacctaacatgttgaatttattaagtaatgttgaaacgtcactatatgaaattcaaatgttaaattataaatatgaaaatattcaattacgtaatttcccattcggaggagacatcatcttcgtgcgtattatccgtaataatgagtcgattgttccgcatggagatacacaattgcgatatggagatcgcttaattgttaccggtgctaaagaatacgttgatgaattgaagcaagagttagaattttatttttaacaataatgatattaaaatgcagacgtattttagtacgacgtaaaattaatgatattaaaatgctagtatgtatatgattttgataaataaatgctttttacgtaaatcaagtttgatacagaaaggactaaatcaaacatttatcgttgtaatacgtttaaataactttattaaaaagtcataatagtgttaaaatgtattgacgaataaaaagttagttaaaactgggattagatattctatccgttaaattaattattataaggagttatcttacatgttaaatcttgaaaacaaaacatatgtcattatgggaatcgctaataagcgtagtattgcttttggtgtcgctaaagttttagatcaattaggtgctaaattagtatttacttaccgtaaagaacgtagccgtaaagagcttgaaaaattattagaacaattaaatcaaccagaagcgcacttatatcaaattgatgttcaaagcgatgaagaggttattaatggttttgagcaaattggtaaagatgttggcaatattgatggtgtatatcattcaatcgcatttgctaatatggaagacttacgcggacgcttttctgaaacttcacgtgaaggtttcttgttagctcaagacattagttcttactcactaactatcgttgctcatgaagctaaaaaattaatgccagaaggtggtagcattgttgcaacaacatatttaggtggcgaattcgcagttcaaaactataatgtgatgggtgttgctaaagcgagcttagaagcaaatgttaaatatttagcattagacttaggtccagataatattcgcgttaatgcaatttcagctggtccaatccgtacattaagtgcaaaaggtgtgggtggtttcaatacaattcttaaagaaatcgaagagcgtgcacctttaaaacgtaatgttgatcaagtagaagtaggtaaaactgcggcttacttattaagtgatttatcaagtggcgttacaggtgaaaatattcatgtagatagcggattccacgcaattaaataatatcattcaacagctttgttcacgttattatatatgtgagcaaagcttttttgcttttataataatcggactgatggaaaattatttgatatttcatttgactgattttttatgcacaaaaaaatcgcctcaaaagctgtagtttcaacttttgatgcgatagtatcttatattcttaaaagacatccacagaattagtccttaacattactgtttgctttatcaataatgcgttggcggtatttgaaaatattactaacaaccgttttaagtacagcatataatggcactgcaatcagaactaatgtaaagccacctaaatctcctgctgctaaaataacaacgataattgttagaggatggatacttaaagatttacccattacatttggcgtaatgatattaccttcaagttggtgtgcaattaatgtaatgatacaaacccatataaatgtagtaggactatctataataccgagtattgctgcaggtgcaaatgataaccatgaacctaagaaaggaattaagtttgcgacaccagcaaatagtactaataaaggaatatatggtaagtcaataattgaataaccgatatataagaatatacctaaaataacactgacagttacttgaccttgaatgtaagattttaatgtaaagtttaaatcagttaataaatctacgaaaaatactttacgttcacctttgaaaaatttagcaacagctgggataaatttttcatggtcttttaacatataaattaagaagaatggaaccataatcaataagaagatggttgaaattaatgatgtaatgtactgtaatgaattagataaaatattagtaacgccatcacccattgatttaaccatatttgtaattctacttgttacatcttcaggtaatttatccatttgagctagtgcgaatttaataatttgctctgcttctttttgtagggcaggtgtctgactaattaaattgttgatatttgaaatgatgattggtgcaacaaacgcaacaattaagccgataatagcaaacaaagctaacatgattgttgttatactagcccatcttggaaaaccgactttttcaagtgagttttgaaaaggtagacagatataaaataaaaaaccactaattaaaaatggaagaaatacagaaccgatgattgtagctattggagtaaatacttcgtgcacttccataaatagtttgatgagaatgaacagcataatcagagcgatgccagttcggaaccaaaccttgtttaacataaacgatgttcctcctatttttctaaacttagttattatttagtatatcctaaatagcagtgcttaaaaaggttaatattttttaaatatacttaaattaaccattcactttctattttaagatatttactttcaatagtttgtgagacttttcaatgactcgtaagtctgcaattggatcaaacagcaccagtttatatgaataacttattttaatattaaacgtgtttaaataatgaaataatcatattaatatttataagaatattctgaaaaatatattgaagtgtctcgtgcttaatcgtataatatttttatgtttaaacaatagggggaatcttatgattgaaaaattagtaacctttttaaatgaggttgtatggagtaagccattagtttatggtttgctaattactggtgtgctatttacattgcgtatgcgattttttcaagttagacattttaaagaaatgattcgattaatgtttcaaggagagaagtctcctaatggtatttcaagttttcaagcgatagccatgtctttagcaggcagggttggtacaggtaatattgtcggtgtatctactgcaatatttataggaggacctggtgcagtattttggatgtggattactgcgtttttaggtgcaagtagtgcttttattgaatctacacttggtcaaatattcaagagagttgaaaataatgaataccgtggtggaccagcgtattatattgaatatggtattggtggtaaatttggtaaaatttacggaattatctttgctattgttacgattatctcagtaggtctattgcttcctggtgtgcaatctaacgctatagcaagttctatgcataatgcgattcatgttccacaatggttaatgggtgctattgttgtagttattttgggattaattatttttggtggtgtacgtagtattgccaatgttgcaacagccgttgtaccatttatggcaattatttacatactgatggctgtcattatcatttgtatcaatatacaagaagtgccagcgttatttgcattaattttcaaatcagcatttggattacaatctgcttttggtggtatcgttggcgcaatgatagagattggtgttaaacgtggattatactcaaatgaggctggtcaaggtacaggtccacacgcagcagcggcagcagaagtatcacatccaagtaaacaaggtctagtacaagcattttcagtttatattgatacattatttgtatgtactgcaactgctctgattatacttatttctggtacatataatgtgactgatggtacggttaatgcgaatggcacaccgcatttaattaaagatggcggtatttatgttgaaaatgcaacaggtaaagattattcaggtactgcgatgtatgcacaagccggcattgataaagcgttccatggcagtggttatcaatttgatcctactttctctggcgtaggttcgtactttattgcatttgctttattcttctttgcatttactacaattttgtcgtactactacattacagaaacaaatgttgcttatttaacgcgtaatcaaaataatcaagtttcatcgatatttattaatattgctcgtgtgattattttgttcgctacattttacggtgcagttaaaacagctgatgtagcatgggcattcggtgatttaggtgtaggtctaatggcttggttaaatatcattgcgatttggattttacataagcctgccgtaaatgctttaaaagattatgaaattcaaaagaaacgtttaggaaacggttataatgcagtttatcaacctgatccgaataaattacctaatgctgtcttttggttgaagacatatccagaacgtttaaaacaagcacgtgccaaaaagtaatctacttttgtttatagtatatgtagtgatcatttgataaaaaaagaaacagcattgataattttaggtgctcagaaatttgaattttaaaaatatagtgtctcttggtacaataacaatacaactactagggggcacttttttatgtcagaatttaaaactggtaagattaataaacatgttttatatagtaatattttaaatagagatgtcacgataagtatttatttaccagaatcttataatcaacttgttaaatataatgtcattctttgctttgacggattagattttttacgtttcgggagaatacaacgtacatatgaatcgttaatcaaagaagcgcgtattgatgatgcgatcattgttggattccattatgaagacgttgataagcgtagagaggaatttcatccacaaggaagtcgttctcatttaactattcaatcagtcggtaaagaaatattgccatttattgactcgacgttttctacactgaaagtaggtaatgcaaggttattagtaggggatagtttagcgggtagtattgccttattaacggcgttgacctatccaacgatttttagtcgtgtagcaatgttaagtccacattcagatgacaaagtattagataagctaaatcaatgtgctaataaagaacaattgacaatttggcatgtcattggtctagatgaaaaagattttactttaccaacaaatggtaagcgtgccgatttcttaacaccgaatagagaattagctgaacaaattaagaaatataatataacttattattacgatgaatttgaaggtggtcaccaatggaaagattggaaaccattgctgtcagatatattattgtattttttacgtaaaaacacagatgatcaacattatgagtaatttacattagtagatttagtatgaattgtcttcatatagtttggtctataatataatttataaaagattttactgtttgatttaatttaaatttgtcgaaattgcaaaagatgtataatgaattatttttaatgtaacggttttcaaagaaatttgatataatagcaataggttaaacaaaggaggaattcagatgattttaggattagcattaattccatcaaagtcatttcaagaagcggtggattcttaccgtaaaagatatgataaacagtattcacgaattaaaccacatgtgacaattaaagcgccatttgaaattgaagatggtgatttagattctgtcattgaacaggttagagctcgtattaatggtataccagcagtagaagttcatgctacaaaagcttctagcttcaaaccaacgaacaatgtgatttactttaaagttgcgaagacggacgacttagaagaattgtttaatcgctttaatggagaagatttctatggagaagctgaacatgtttttgtgccacactttacaatagcacaaggactatctagccaagaattcgaagatatttttggtcaagtagcattagctggggtagaccataaagaaattatcgatgaattaactttgttacgttttgacgatgacgaagataaatggaaagttattgaaacgtttaaattagcttaagtaacataatagtattgttaatcgtagtatgtttgaattaataagaaaatggtcatttttattgaatgtaataaaaatgaccattttctttattttaaaatacgttttaaccttacttagctttttctctatttgctataaagtagcttccataaaatacagctaagactaaaaagattaatgccgagaaataaaatgtattgtttaaattgttggtaaattgtgtaattaatccgccaaataatggccctatcattgagccgaatccttggatactattaaaaacaccccaagtttcttcttgttcatctgatttgataaatcgtgccataaaggtattccatgctggtaataagatgccatacattagaccgatagctaaagcgataatccacacgatgtgaatattaacaatcatagatagagtgaaaattaatatcatgtataaaataaatccgcttagaataacaccatacataaagtttctgctgcggttatctattagtttcgataaaaatagcatcgaaactgcacagccgataccaccaataatgattgcaacagtatattcaattgtacttacgttaataaccttagtagcatatgttggtaatataggaactagggcagcaattgcggcaccttgtaaaagaataccagggaacaacaataaatggcgctttgtcacatcaacaatttgtctcaattgagctttaactggacgagtattataatttgttaactttacatcgacaaaataatataatatccatgcaattaaaacgactaaagacatcatgaaggcaaagcgtgttgggtgcactttgataagtagattcataaaaaccatacctaccaataggcctaacaaccatgaaaaataaacatagcccatttgtttgccacgtttatcttcttcaacactggataacataatgacccaaataggactaactgcaataccgagcatcatagcactaaatatgattacaaaaggtgatgctggaaaccaaataactaaaaataaacttgtaaatgctaaaataaatccagtcgttaaaacgatttttgtgccgaattttttcagtaaaaatcctataacaaagtttgtagatgcatcagcaataaaatgtattgaaaatgctagagacgttattgctacagcaatggatgtaactgttggcaagaaattaatatagcttaggatatacatgcctctcgcaaattccattaaaaataagataataagcattaaaatgaaatttttatgattagcgtaattatttaacgaagaatcttgcatataaaggaacctttccataaatctcttgtggttgtgatgaatgaccgattaaatcaagtaagtctcgacatattgtctgtgtagcatacttaattttatcttgttccattgtactaatcatattagttaattgctcattaccgttcgttaaacttgctacaatttttattgcttcttctggagtatcagcgattttaccaaaacctttttcttcaaagtaaagggcattttcaagctcttgaccaggtgcaggatttaggaaaatcattggaatacaacgggcgaaaccttcagttattgtgataccaccaggtttcgtaatcataagttgacttgatgccatccattcattcatgtgtttggtataacctagaatcaatacattctcgttagatttaaacttagctgttaaagaacgctttagctctttgctcttaccacaaatcataactacttgtgcatttgcacttttcgctaatatatcagtgatcatcgtgtcaaaacctttagatacaccaaatgcaccagctgacattaaaatagtttgcttatctggatctaagttgttgtctattaaccactgcttttgattaataggcgtttcaaatttgttatcaataggaatacctgtcactttaactgttgaaggatcaatacctacgtctatgaagtcttgtttcgtttcttttgttgccacataatatcttgttgaatacggcgtaatccagtttttatgtaagcgatagtctgtcatcactgtagcaactggaatattaatgttaaattgctcagtgagtaccgacataactggtgtaggaaacgttaataatattaaatctggcttttcttttatcaataaattgattaacttattaagtccatagtatttgtaaaaacatttgtctagtttatctgggcggctgtaataaaaccctttgtacatatttctaaaatatttaaagctattgatataccattttttacaaatagaagtcaaaattggatgagcttccataaataaatcgtgctcaatgacgcttaaatggtctagattcatatcattaagttgattaacgatactctgtgtaacttgcatatgaccgttaccgaatgagccagtaataatcaatatctttttattttgagtaaccattaatagccaccctccattagtttgaaaattttatttaagtgtaacttattttacggcattataaaagaaataaagacgcaaagtcgttacatttatagcaattttaatcaatagatgaattgatacaaaataaaacgttattttataaagcaatttattgttctatgttttatttgtatatttaaaattatccagtatacaattatagcatatttttggaaacaattatgatattataccatgttacaagatggttttaataatttaagatgagccataattgtgaaactaattcataataacgtatgttttatttttaatagtagaaattagaaaatgctgattagtaggatataacagtgaaattataaatttattaacatcaacaaaacgtgtataataaacatattgtagaaaaaggagcggttcagtttggatgcaagtacgttgtttaagaaagtaaaagtaaagcgtgtattgggttctttagaacaacaaatagatgatatcactactgattcacgtacagcgagagaaggtagcatttttgtcgcttcagttggatatactgtagacagtcataagttctgtcaaagtgtagctgatcaagggtgtaagttggtagtggtcaataaagaacaatcattaccagctaacgtaacacaagtggttgtgccggacacattaagagtagctagtattctagcacacacattatatgattatccgagtcatcagttagtgacatttggtgtaacgggtacaaatggtaaaacttctattgcgacgatgattcatttaattcaaagaaagttacaaaaaaatagtgcatatttaggaactaatggtttccaaattaatgaaacaaagacaaaaggtgcaaatacgacaccagaaacagtttctttaactaagaaaattaaagaagcagttgatgcaggcgctgaatccatgacattagaagtatcaagccatggcttagtattaggacgactgcgaggcgttgaatttgacgttgcaatattttcaaatttaacacaagaccatttagattttcatggcacaatggaagcatacggacacgcgaagtctttattgtttagtcaattaggtgaagatttgtcgaaagaaaagtatgtcgtgttaaacaatgacgattcattttctgagtatttaagaacagtgacgccttgtgaagtatttagttatggaattgatgaggaagcccaatttatggctaaaaatattcaagaatctttacaaggtgtcagctttgattttgtaacgccttttggaacttactcagtaaaatcgccttatgttggtaagtttaatatttctaatattatggcggcaatgattgcggtgtggagtaaaggtacatctttagaaacgattattaaagctgttgaaaatttagaacctgttgaagggcgattagaagttttagatccttcgttacctattgatttaattatcgattatgcacatacagctgatggtatgaacaaattaatcgatgcagtacagccttttgtaaagcaaaagttgatatttttagttggtatggcaggcgaacgtgatttaactaaaacgcctgaaatggggcgagttgcctgtcgtgcagattatgtcattttcacaccggataatccggcaaatgatgacccgaaaatgttaacggcagaattagccaaaggtgcaacacatcaaaactatattgaatttgatgatcgtgcagaagggataaaacatgcaattgacatagctgagcctggggatactgtcgttttagcatcaaaaggaagagaaccatatcaaatcatgccagggcatattaaggtgccacatcgagatgatttaattggccttgaagcagcttacaaaaagttcggtggtggccctgttggtcaataaaagatttattgatgaaggtaaaactattgatgtttatttattcgaagcattaaatgaccagataatcattgctataccagattggttttggtcatatcagatggcaatgacattagatgaagaaacttgttttgaagcaatactcatgcaattgtttgtttttaaagaagaggaagaggcagaatcgattgcatcacaactaacagattggatagaaacatataaaaaggagaaagactaatgaacttaaagcaagaagttgagtctagaaagacttttgcgattatttcacatcccgatgcagggaaaacaacgttaactgaaaaactattgtacttcagtggtgccattcgtgaagcgggtacagttaaagggaagaagactggtaaatttgcgacaagtgactggatgaaagttgaacaagaacgtggtatttctgtaacaagttcagtaatgcaatttgattacgatgattataaaatcaatatcttagatacaccaggacatgaagacttttcagaagatacgtatagaacattaatggcagttgacagtgctgtcatggtcatagactgtgcaaaaggtattgaaccacaaacattgaagttatttaaagtttgtaaaatgcgtggtattccaatctttacattcattaataaattagaccgagtaggtaaagaaccatttgaattattagatgaaatcgaagagacattaaatattgaaacataccctatgaattggccaattggtatgggacaaagtttctttggcatcattgatagaaagtctaaaacaattgaaccatttagagatgaagaaaatatattacatttgaatgatgattttgagttggaagaagatcatgcaattacaaatgatagtgcttttgaacaagcgattgaagaattaatgttggttgaagaagcgggtgaagcctttgataatgacgcgctgttgagtggagacttaacacctgtatttttcggttcagctttagctaactttggtgtacaaaatttcttaaatgcatatgttgattttgcgccaatgccaaatgcaagacaaacaaaagaagaggttgaagtaagcccgtttgatgattcattttcaggatttatctttaaaattcaagccaacatggaccctaaacaccgtgatagaattgcatttatgcgtgtcgttagtggtgcatttgaacgtggtatggatgttactttgcaacgtactaataaaaagcaaaagatcacacgttcaacgtcatttatggcagacgataaagaaactgtgaatcatgctgtagcaggcgatatcattggactatatgatactggtaattatcaaattggagatactttagttggtggaaaacaaacctacagtttccaagatttaccacaatttacgccagaaatttttatgaaagtttctgctaaaaacgtcatgaaacagaagcatttccataaaggtattgaacaattagtacaagaaggtgcgattcaatactataaaacattacacacaaaccaaattattttaggtgctgttggtcagttacaatttgaagttttcgaacatagaatgaaaaatgaatataatgttgatgttgttatggagccagtaggccgtaaaattgcacgttggattgaaaatgaagaccaaattacagataagatgaacacatcaagatcgattttagtgaaagatagatatgacgatttagtattcttatttgaaaatgaatttgcaacaagatggtttgaagagaaattccctgaaattaaattgtatagtttactttaacagctcaattgtataatcgaatttgttacattaaaaataattgtttcgttgaagaaaaataaattgtatattttaaaagaaaaaggtatactatgatgtatcaaatgaataacctatggcattttgtcagaggggagtaacttaagaatcatgaccgtataaatgattcgacactttatcgtcattacgaagatatcttccggtaaagtgggcaatttaaattgcttagtgagacctttgctatttatttagcataggtctttttgtttgtacttaacttatttatttaaaggagttgtacatgttaatggatccaagtttgatcttaccttatttatgggtacttgtcgttttagtatttttagaaggcttattagcagcagataacgcgattgttatggctgtaatggttaagcacttaccacccgaacaacgtaaaaaagctttgttttacggtttgttaggtgcatttgtatttagatttttagcattattcttaattagtattatcgcgaacttttggtttattcaagctgcaggagcggtttacttaatttatatgtcaatcaaaaatctgtggcagttctttaaacacccagaaattgaaagtcctgaagctggagataatcatcattatgatgaatctggtgaagagattaaagcaagtaacaaatcattctggggaactgtgttgaaaatagaatttgcagatatcgcatttgccattgattctatgcttgctgctttagctattgctgtaacacttcctaaagttggtattcactttggtggtatggacttaggtcagttcgtagtcatgttcctaggtggaatgattggtgttattctaatgcgttatgcagcaacatggtttgtagagctattaaacaaatatccaggacttgaaggtgcagccttcgcgatcgttggttgggtaggtgttaaattagttgtcatggtattagcgcacccagacatcgctgtattgcctgagcacttcccacatggcgtattatggcaatctattttctggacagtactaattggattagtaattatcggttggttaggttcagttgttaaaaataaaaaatcgcataaataattgatgtgaagcggacaatcttaatttagtttaaggttgtcctttttcatttaattgagtgatttatgaaaaatggattttgaagaatgtgaatcaaaagatgcgatatagtattaagaaaatgtgccttttatatttagcattttttcaatagaaattatatagattttaaagcaaattaggtgttaatgtgtcataatgatacagataacgccttaattacagtgttttcaaggtgttcagaatgtgttgcaaggtaaaaaagggcataaaaagggcagatggattttagtatataagcttttctaattttcgatctaattctctatccattttctccgttacatgggtgtatacttttatggtcgttttttcatcggtatgcccaacccttttcataattgcttttaacgatacattcatttccaccaataaacttatatgcgtgtgtcttaaagtatgggtagtgacctttttatttatattcaatgattctgcagctaaagataaaagtttgtttattttatcaatttgtaaaggatttcctttactagttgtgaataagaatcctctatcaatataacttggtttccattgtttcatctttttattttctaacattatcttttttaaaacctttgctgttctggaattgatggtaatgtttctttttgaacctgtagtttttgtagtatctttatatccaaacccagtattacatttaattctatgaagagttccgttaatatcaattgttttattttttaggtcaacatctttaatttgaagtgctaataactcgcctatacgcattcccgttaaagcttgtacttctagagcaccagcaattaaaatacgagttctgtaatgcaaactgttataattcaatataaaatcgcgtatttgaatgacttgttgtaattcaagatagttgtacattttagcttcgtctttttcaatatcttcaatcgtttttcttttctttggaagtttgacaccggttagtagatgttcatttgggtaatcgtagaatttaactgcgtatttaatagcttctttcatgtgtccaagttggtaccttaattgatttgtagaatagatgcttgacaacttattaataaacatttgcatgtattttgtatcaagcttgtttaaaagtaattctttagcactgttcttttttatatttttgaccctcgttttgatattattaagagtagtcacctttgaacctgatgtttttatatgatattcaagccattcatctaatagagtgtgaaaagtcaaagtttttaattcgcttgacgacttgttgtttagtttttcttttatcttttcttctaaacgaaacattgcctctttttgtgattgttttgtatttttgttcaagacaacacttacgcgcttccatttatctgtgtatggatctttgtatttctcgtagtatctgtatttagtttcgttgtttttatttttgaatttttcgaaccacatgtttatacctcctgtaagaacgtatgttctatatttttttaaaaaaataataagggtaggcgggctacccaatatttagtactaggtactaaatgtgatataataaaataaaaagtaggtgatattttgcaaattttactattgataattacaactgggataccaggattttatacttactatgctctatccaataagaatttggtgtatttcgatagtgataataagaaagttattctcgctttcttttctgtagtttctgtttttatttttttattaactcttagtctgttttcaggacaaaacaacgtaaatcagctatttcaaaaattaacttttacaaaaacattgtctgcactaatagtaagtatattaataatcatcatattaacagaattcgtgtatacaaaaattatagaaatatacaatatttttagtaatcataaccgtaaaagtaataatttaaaaaaagttgaaacgttacctgtacatctattaaagtatgaagataataaatataaaatgttcataactgtaaaagatttcgaaggtaacataattgaaaaaggattccttgataactattcaagaaaacacaatcgaaatatattacttgatactagatttaatgctaattacgaagacttcaaaacattgtctgaatacaatgattcatatttagattttgaaaacaaagttaaattagaatatctatatatcgataagaaaaaattaattatttcttcttaggttcttggattaaactttcaacttgaccgctagttaatttttgatcacttccggactcgccatttctaatttctcctttattctcgctcacgttctcaccaccattcaacgtctacactagtaggcgtttttgattttttttaaatcctttttctcgtcacgctatataggtacttttaatcataattaaagccaagtttatttaaaatctctaaataatctgacgactttgcccgtaatgtttacgtcatttatttttgacattgggtagcttctatctttaatggtaacgtaattagataatcgctttagggtaaatgtgtcatctgagttaaatataatttcgcaaaaatattcatcagtttcagttccgttctctgggaagaaaacggttattatatctctatcaaagataaagtcgattacatcatcatcttgatctaaaatgtagcaaacagtcatatcgccattttcaactcttcttgcgctatttatagtagttattggttgggcaactaatttgccttttgcctctgtgtatctttttggaaattccacataattcattaaatcgattgtttcatttgtttccatattagctcttctttcttatattgttttattagttaatattggctcctggtactgcgctagcaccagctcttgcttcctcttcttttccttttttgtactcttcaaaagctttagcctgttcatctttagtccagccaggcgaaacgacatactcatcatttaaattagtattttgtgaatcgttttcatttatatttgcaggtgcgttattagacaggtctgaatgattactaaattgattgttttgtgcttggctttgattggttgcattgttttgtacgctattaataggtggatttttatcttcaacttttttcggtttttcttgatgattttttgttttactatctttgtgcttttgtgtttgcgactttttattttcttctttttttggtttttctttttcaccacaagctgttaaagctaatgtacttactagtagcagtccgattacttttttcatatgtatctctcctttgtttatatttccttatatttaaaaactctcaacggctcaaacgtaatagaatactcgccatagtgagttccaataccatatatctttttatattgttctatagcttctagtatgtatgattcactcaactgcagatactctgacaactcgtacaaattacgaacaccgtagttgtgagcttctacaatttcatgtagcggtacagctgaagtaaaaccatgtctacgtgcataattttcaaattttctattaatccattttgattggtctaaaatgttgccatacgtcaacttgtggtgggcaagttcctcatataacacttctgctttacgtatttctgataaattacgccttatataaatttttccgttcatatagcatccaggttggaaatttggaagctggtcagtttcttctatctttattttttcgttatttatgcaaagttcttcgtataatcccaatataaacaccctttatttgtctctatttctaacccattcaatgaatctatttacttcttcaatctcttcttcagttaatccctccttatcaaaatgagcagcaattgtttcttgatgtatatctttttttgattcagtaattcttgatttcggtacattgaagtaatctgcaagttgttgaattcttttaattcgtggatatttagtttgttgaatccaattggagactgtaggttgagaaactccaatagcttcagcaagttctctctgatcaatatttttatcattcataagttcttgaaggttttcagataaaatttttctgactttattattctccatagttgtctcctttaatattacttaatgtaatattaacttaccataactgacattactttacaatactttttataactttttatgaagaaatataactttatctgttgacaagtaatacaaagtaatataaagttatacgtgtgaaagggaggtggacgacatgccggaacaattatccgtaagaaaatggagacttgtaagggacttgaaacagcaagaagtagcagatatattgggcgtcaatgcaaagacagttggtcattgggaaaaggatgacactaatttaagtaatgttacagtttacgctttagcaaagttatatgatattgaggtagaccagataaaggtctaaattttttgaccttcgtataactttttataacttttaggtaatgtaacaaatggacataaacaacttaaaaggaggaacaacaaatgaacgaagaaaaattaaagatgattctcttacttcttgaagatataccaagagacgaatggaatcgattagtaaatgaagtaaataatcaatacagttaccaagctgacaaggtaggacttgccagtgataactgtcaacaaatagcaaataactataagcactatggattttaagatggataaggactatcgttattcttttcacctttaacgttaatgtcgaaatacaaaacatgatctaaactgacaactctatcttttggatgaatgatgtgtagagttttgctttcagcatcttttatatgttcttgtactttaataacttcaccattaattaaatgtaaatctaaagaagtaacgatttctttatctaaatattgagtgagcaatctcttatgtatacttatcacctccttaggttgataacaacattatacacgaaaggtggaacaacaaatgaacaaaaaatcagaagggttagacataatcataccaaggattttcagaagagatcatgcgtcagtagaatctttaacagaaaatgaacgtcgactaagaaaggaaatattaggaagtattaaaaaaggtgattacagctacttagaaataaacaaagttttctatgcattagatagagaacttcaatacagagcgaataataacaaactttaacatttatcgaaaggagtgatagagatgccaaaaatcatagtaccaccaacaccagaaaacacatatagaggcgaagaaaaatttgtgaaaaagttatacgcaacacctacacaaatccatcaattgtttggagtatgtagaagtacagtatacaactggttgaaatattaccgcaaagataatttaggtgtagaaaatttatacattgattattcaccaacaggcactctgattaatatttctaaattggaagagtatttgatcagaaagcataaaaaatggtattaggaggatattaaatgagcaacacatataaaagctacttaatagcagtactgtgcttcacagtcttagcaattgtactcatgccgtttctatacttcactacagcatggtcaattgcgggattcgcaagcatagtgacattcatgttttataaggaatacttttatgaagaataaaaaaactgctaattgttggagcaagtaacagaaaagtaattagaaatataaacttacgttcaatataaaacgaaaaacggaggaagtcaaccatgactaaaaattataaagacatgactcaagacgaattaagggatttattggctgaaaagaatgcagaattgtttgatttagcgagcgaaatcgatgaagaaactgaatttgacgttttacttttttcaaatgtagggattagcaacggagattttacaccgtcgtcacattgtgtgattgggaatgttgttgatattgctaatttattgaaacgtagagctgtttaccgagatatcgctgatgttatcaaaatgcgttaaaaattctagctatagataatgacaaggaggactaaaacaatgtattacaaaacgggtgacgtatgtcaaaaaataattaatgtagatggctttgattttcgattaagagttaagaaacgagcgtatagcgtcgaaatagttgttttagatcatgaaggaaattcaattgacgggttactagtttctgatgagaacgatctatacacagctttagatattttaaaacaaacaatttatgaatggattgaattcaacacagatgaacaggacaaattaatcaatttaatcatgaaatggtaggaggagttaatcaatggcagtattagaagatatttttgaagaattaaaactattaaataagaatttacgcgtgttaaatactgaactatcaactgtagattcatcaatagtacaagagaaagttaaagaagcaccaatgtcaaaagaagaaacagctcaaccggaatcaattgaagaagttaaggtaacttctgctgatttaactaaagattatgttttatcagtaggaaaagagttccttaaaaaagcagacacttctgataagaaagaatttagaaataaacttaacgaacttggtgcggataagctatctactatcgaagaagatcattatgaaacaattgttgattttatgaatgcgagaataaatgcatgaaactagatcactcaaatagagctcatgcaaagcttagtgcaagtggagcgaaacaatggctaaactgcccaccgagtattaaagcaagtgaaggtattgcagataaaagttcagtttttgctgaagaaggtacattcgcccatgagttaagtgagttatatttcagtcttaaatatgaaggcctaacacagtttgagtttaataaagcttttcaaaattataagcgaaatcaatattatagtgaagaattgcgtgaatatgtggaagagtatgtagctaatgtagaagaaaagtataacgaggctttgagtagagatgacgatgtaatagctttatttgaaacaaaattggatttaggtaaatacgtccctgaatcttttggcactggtgatgtcattatattttcaggtggtgtacttgaaattattgaccttaaatacggtaaaggcattgaagtttcagctatagataatcctcaacttagattatatggcttgggcgcatatgaactgcttagtttaatgtatgacattcatacagttcgcatgactatcatacaacctcgaatagataacttttctactgaagagttaccaatatcaagattacttcaatggggaaccgattttgttaaaccattagccagacttgcttataacggtgaaggtgagtttaaagcaggtagtcattgtagattctgtaagataaagcattcatgtagaacacgtgcagaatacatgcaaaatgtgcctcaaaagccacctcatttgttaagtgatgaagagattgcagaactattatataaactgcctgatatcaaaaaatgggctgatgaagtagaacaatatgcgctagatcaagcgaaagaaaatgataaaaactatcctggttggaagcttgtagaaggtcgctcgcgaagaatgataactgatacaaaagcaacgcttgaaaagttagttgaagcgggttataaacctgaagatattacagaaaccaagttacttagcattacgaatttagaaaaattaattggtaaaaaagcattttctaaaattacagagggctttataaaaaagccgcaaggtaaattaacacttgctaccgagtcggataaacgaccagctataaagcaatctgctgaagatgattttgacaaactataaaaattaaaaaggacggtatataaacatgaaagcaaaagtattaaataaaactaaagtgattacaggaaaagtaagagcatcatatgcaaatatttttaaaccacgcagtatgcaagaaggtcaagaagcaaagtattccatcagtttaatcattcctaagtcagatacaagtacgataaaagctattgaacaagctatagaagctgctaaagaagaaggaaaagttagtaagtttggaggcaaagttcctgcaaatttaaaacttccattacgtgacggagacactgaaagagaagatgatgtgaattatcaagatgcttatttcattaacgcatcaagcaaacaagcacctggtattgttgaccaagaccgaaatagattaacggattcaggagctgttgtaagtggtgactatattagagcttcaatcaatctatttccattcaatacaaatggtaataagggtattgcagttggattgaacaacattcaacttgtagaaaaaggcgaacctcttggcggtgcaagtgcagcagaagatgatttcgatgaattagacactgatgatgaggatttcttataagtcaataggtggggtttttagccccactttaattttaaagaaattgaggtgtcaagaatttgaaatttatgaatatagatattgaaacatatagcagtaatgatatttcgaaatgtggtgcctataaatatacagaagctgaagatttcgaaatcttaattatagcttattcaatagatggtggagcgattagtgcgattgacatgactaaagtagataatgagcctttccacgctgattatgagacgtttaaaattgctctatttgaccctgctgtaaaaaagtatgcattcaatgctaatttcgaaagaacttgtcttgctaaacattttaataaacagatgccacctgaagaatggatttgcacaatggttaattcaatgcgtattggcttacctgcttcgcttgataaagttggagaagttttaagactacaaaaccaaaaagataaagcaggtaaaaatttaattcgttatttctctataccttgtaagccaacaaaagttaatggaggaagaacaagaaatttgcctgaacatgatcttgaaaaatggcaacaatttatagattactgtattcgagatgtagaagtagaaatgacaattgctaataaaattaaagactttccagtaactgcaattgaacaagcatattgggtttttgaccaacatataaacgacagaggtattaagctttctaaatcattgatgttaggagctaatgtgctcgataagcagagtaaagaagaattgcttaaacaagctaaacatataacaggtttagaaaatcctaatagtcctacacagttattggcttggttaaaggctgaacaaggattagatatacctaatttacaaaagaaaacggttcaggattacttaaaaagagcaacaggaaaagctaaaaaaatgctagaaattagattgcaaatgtctaaaaccagtgtaaaaaaatacaacaaaatgcatgacatgatgtgcaatgatgaacgagtaagaggtctgtttcaattctacggtgccggtactggaagatgggcaggtagaggtgtacaacttcagaatttaacaaagcattatatttcagatactgaattagaaatagcaagagatcttattaaagaacaacgttttgacgatttagatttattactcaatgttcatcctcaagacttattaagtcaattagttaggacgacatttactgctgaagaaggtaatgaactagcagtaagtgatttttctgcaatagaggcaagagtcatagcatggtatgcaaaagaacaatggcgtttagatgtgttcaacacacacggaaagatatatgaagcgtcggcttctcaaatgtttaatgtcccggtagaaagcataactaaaggcgaccctctcagacaaaaaggaaaagtgtccgaattagctttaggttatcaaggtggcgctggagctttaaaagcaatgggtgcattggaaatgggcattgaagaaaatgaattacaaggtttagttgatagttggcgtaacgcaaatcctaacatagttaatttttggaaggcttgccaagaggctgcaattaatactgtaaaatctcgaaagacgcaccatacacatggacttagattttacatgaaaaaaggttttctaatgattgaattgcctagtggaagagctttagcttatccgaaagcttcagttggtgaaaatagttggggtagtcaagttgttgaatttatgggcttagatcttaaccgtaaatggtcaaagttaaaaacgtatggtgggaagttagtcgagaatattgttcaagcaactgcaagggatttacttgcgatttctatagcaaggcttgaagcatcaggatttaaaatagttggacatgttcatgatgaagtaattgtagaaatacctaaagattcaaatggacttaaggaaatcgaaactatcatgaataagcctgttgattgggcaaaaggattgaatttgaatagtgacgggtttacttctccgttttatatgaaggattaggagtgtgattgcatgcaacatcaagcttatatcaatgcttctgttgacattagaattcctacagaagtcgaaagtgttaattacaatcagattgataaagaaaaagagaatttggcggactatttatttaataatccaggtgaactattaaaatataacgttataaatattaaggttttagatttagaggtggaatgatggctagaagaaaagttataagagtgcgtatcaaaggaaaactaatgacattgcgagaagtttcagaaaaatatcatatatctccagaacttcttagatatagatacaaacataaaatgcgcggcgatgaattattgtgtggaagaaaagactcaaaatctaaagatgaagttgaatatatgaagagtcaaataaaagatgaagaaaaagagagagaaaaaatcagaaaaaaagcgattttgaacctataccaacgaaatgtgagagcggaatatgaagaagaaagaaagagaagattgagaccatggctttatgatggaacgcctcaaaaacattcacgtgatccgtactggttcgatgtcacttataaccaaatgttcaagaaatggagtgaagcataatgagcataatcagtaacagaaaagtagatatgaatgaaacacaagacaatgttaaacaacctgcgcattacacatacggcgacattgaaattatagatttcatcgaacaagttacggcacagtatccaccacaattagcattcgcaataggtaatgcaatcaaatacttgtctagagcaccgttaaagaatggtcatgaggatttagcaaaggcgaagttttacgtccaaagagcatttgatttgtgggagtgatgatcatgacagatagtggacgcaaagaatacttgaaccaatttttcggatctaagagttatctgtatcaggataacgagcgagtggcacatactcatgtagtaaacggcaattattactttcatgggcatatcgtaccaggttggcaaggcgtgaaaaagacatttgatacagcggaagagcttgaaacatatataaagcaaagtgatttggaatatgaggaacagaagcaactaactttattttaaaagggcggaaacaatgaaaatcaaaattgaaaaagaaatgaatttacctgaacttatccaatgggcttgggataaccccaagttatcaggtaataaaagattctattcaaatgatgttgagcgcaactgttttgtgacttttcatgttgatagcatcttatgtaatgtgactggatatgtatcaattaacgataaatttactgttcaagaggagatataacaatgaaaatcaaagttaaaaaagaaatgagattagatgaattaattaaatgggcgcgagaaaatccggatctatcacaaggaaaaatatttttttcaacaggatttagtgatggattcgttcgttttcatccaaatacaaataagtgttcgacgtcaagttttattccaattgatatccccttcatagttgatattgaaaaagaagtaacggaagagactaagtttgataggttgttagaggtatatgagattcaagaaggagtctataaatccgcattacacaaaggtatcagtttgaacgaacgttttgaagacgacaatatttttcctactaaagcattctatatcttaaacgatgacatgacgatgacattgatttggaaagatggggagttggtagaatgatgttgaaatttaaagcttgggataaagataaaaaagttatgagtattattgacgaaatcgattttaatagtgggtacattttgatttcaacaggttataaaagtttcaatgaagtaaaactattacaatacacaggatttaaagatgtgcacggtgtggagatttatgaaggggatattgttcaagattgttattcgagagaagtaagttttatcgagtttaaagaaggagccttttatataacttttagcaatgtaactgaattactaagtgaaaatgacgatattattgaaattgttggaaatatttttgaaaatgagatgctattggaggttatgagatgacgttcaccttatcagatgaacaatataaaaatctttgtactaactttaacaagttatcagataaacttcacaaagcattaaaagattgtgaagagtacaagaagcaacgagatgagcttattggggatatagcgaagttacgagattgtaacaaagaactggagaagaaagcaagcgcatgggataggtattgcaagagcgttgaaaaagatttaataaacgaattcggtaacgatgatgaaagagttaaattcggaatggaattaaacaataaaatttttatggaggatgacacaaatgaataatcgcgaaaaaatcgaacagtccgttattagtgctagtgcgtataacggtaatgacacagagggattactaaaagaggttgaagacgtgtataagaaagcacaagcgtttgatgaaatacttgagggaataacaaatgctatgcaacattcagttaaagaaggtattgaacttgatgaagcagtagggattatggcaggtcaagttgtctataaatatgaggaggagcaggaaaatgactaacacattaacaactgatcagttacaagagttattacaaatacaaaaggagttcgacgatagaataccaaccagaaatttaaatgacacagtagctagtatgattattgaatttgtagagtggattaacacgcttgagttttttaaaaattggaagaaacaaccaggtaagccactagatacacaattagatgagattgctgattacttagctttcagtttgcaattaactctgactattgttgatgaagaagatttggaagaaactactgaggttatggttgatttgattgaaaatgaagttactttacctaaactacattcagtttattttgttcatgtaatgcatacactaacggaacaatttgtaaaaggtattgataatagtattgtacaagttttaataatgccttttttgtacgccaatacttactattcaatcgaccaacttatcgacgcatacaaaaagaaaatgaaaaggaaccacgaaagacaagatggaacagcagacgcaggaaaaggatacgtgtaaagacatcttagatcgagtcaaggaggttttggggaagtgagagaacgcactaaaattatatatcgtggttggaataaggagatatttattttacagggtaaaaatatgaatgttattggtttgcgccaaatatttgatgaactcaaaagatcgtatgaaggttataaaatcgttgttattccaatagaagttgattttgaaatcaaataaataggagtgatgagaagtgacacaatacttagttacaacattcaaagattcaacaggactaccacatgaacatattactgtggctagagataatcagacgtttacagttgttgaggcagagagtaaagaagaagcgaaagagaagtacgaggaacaagttaaaagggatgcagttattaaattaagtagatataggagagggataaactaatgaaagaacgactaaaagcatttttatattttttaatgtccatattccttttcccttttacgtttttgtatttgttagcttaccatcactttgaagacaagcaacattttttaacaacatgtatagagtatatagaacttgtttatatattatttatgcatagcattttaggcaaaaaagtaaatgaaccttttaacatcgacgaaatagatttttggttgaggtttggtttcaagctaaaaagatatacaggtttaagtaaagagggaataaagttgttacgtcaagaaatcccagttttacgctacgataaaccagaagtaacaagagactatatagaatacattgatattaattatacggcagacacgtattattgcttttataaagacgggacgtttaggttctatgatgattataccaaccaaaaactaaaaggaaatattgattcagaatttttcaaaaaactagaatcatggaacctcctagtacaaaaaggaaagagaataagtgatgatatttaaaaaaattcgagttggttattagaaatagtaaagaaggtagataaacaatgattaaacaaatactaagactattattcttactagcaatgtatgagttaggtaagtatgtaactgagcaagtgtatattatgatgacggctaatgatgatgtagaggcgccgagtgattacgaaaaaatcagagctgaagtttcatggtaatagctattatcatttttgaattaattatattaatgtgtttagcaatagcactggaggtgttgtaaatatgtggattgtcatttcaatcgttttagctatatttttattgatcttgttaagtagcatttctcataagatgaaaaccatagaagcattggagtatatgaattcttatcttttcaagcagttagtaaaaaataatggtgttgaaggtttagaagattatgaaaatgaagttgaacgaattagaaaaagattcaaaagctaaagagggggctaaagccctctccaggattaaaagaagcggatattttttatttcgtttttgtaaattaaaactaatttatgtgaaattgtctttgaagtcttgataattaagaaggttgaattttctgagattatattagttacgggaaaggcttttcctgagtgcaataaaattaaagttctcaagttttcattttcgtatttatcataaatgatttcgcgtaaagttttcaaaatttgtcacctctttaattttattaaattaattatacaagaaaggagccgaatatgttagacaaagtcactcaaatagaaacaattaaatatgatcgtgatgtctcatattcttatgctgctagtcgtttatccacatattggactaatcacaatatggcttggtctgactttatgcagaagctagcacaaacagttagaactaaagaagatttaactgagtacaataaaatgtctaagtctgaacaagcagatataaaagatgttggcggatttgtcggtggatatttaaaagaaggcaaacgacgtgctggtcaagtcatgaatcgttcaatgctaacacttgatatcgattatgctgctcaagatatgactgacatattatctatgttttatgattttgcatattgtttatattcaacacataagcatagagagataagtccaagactgcgtttagtgattcctttaaaacgaaatgtaaatgcagatgagtatgaagctattgggcgtaaagtcgcagatatcgttggcatggattacttcgatgatacaacttatcaaccacataggttaatgtattggccttcaactagcaatgatgcagaatttttctttacctatgaagatttacctttgttaaacccagataaaatattaaatgaatatgttgattggactgacacattagaatggccaacgtcttcaagggaagagagtaagactaaaagattagcagataagcaaggcgacccagaagaaaagccgggaattgttggtgcattttgtagagcctatacgatagaagaagctatagaaacttttattcctgatttatacgaaaaacattctactaaccgttatacctatcatgaaggttcaactgcaggtggattggtgttatacgaaaataacaagtttgcctattctcatcataatacggatcccgtaagcggtatgcttgtgaacagttttgatttagtacgcatacacttatatggcgctcaagatgaagacgctaaaacagatactccggttaatcgactacctagttataaagcaatgcagcaaagagcgcaaaatgatgaggttgttaaaaagcaattaattaatgacaaaatgtctgatgcaatgcaggatttcgatgaaatagaaaatagcgatgatgcatggtctgaaacgttagaaattacttcgaaaggtactttcaaagctagtattccaaatatagaaattatattgcgtaatgatccaaatttaaaaggaaaaatagcatttaatgaatttacaaaacaaattgaatgcttagggaaaatgccatggaatactaattttaaaatacgtcaatggcaagacggtgatgatagcagtttaagaagttatatcgaaaagatttatgacatacaccattcaggtaaaacaaaagatgccattataagcgtagcaatacaaaatgcttatcatccagtaagggattatctaaataaaatatcgtgggatggacataaacgtcttgaaaagttatttatcaaatacttaggtgttgaagacactgaagtgaatagaacaactaccaaaaaagcattgactgctggaatcgctcgagtaatggagccaggatgcaaatttgactatatgcttacactttatggtcctcaaggtgtaggtaaatctgctttgctaaaaaaattaggtggtgcatggttttctgacagtttggtttctgttacaggtaaagaagcttatgaggcattacaaggcgtttggctaatggaaatggcagaacttgcagctacaagaaaagctgaagttgaagctattaagcatttcatatctaaacaagttgaccggtttcgtgttgcttatggacattatattgaagattttccaaggcaatgcattttcattggtacaactaataaagttgatttcttaagagatgaaactggtggaagacgtttttggccaatgactgtaaatccagagagagttgaagtgaactggtctaaactaaccaaagatgagattgaccaaatttgggcagaagctaaatactattatgaacaaggagaagagttattccttaaccctgaactagaagaagaaatgcgttcaatacaaagcaaacatactgaggaatccccatatacaggtattattgatgaatatcttaacacaccaattcctagcaattgggatgacctaactatctttgaacgaagacgattttatcaaggtgatgttgatatgttaccaacaggaaatgtagattacgttgaaagaaataaggtctgtgcgcttgaagtgtttgttgaatgttttggtaaggataagggagatagtagaggatctatggaaattagaaagatttcaaacatcttaagacaattagacaattggtctgtatatgatggtaataaaagtgggaaaattcgattcggaaaagattatggtgtacagatagcgtatgtaagagatgaaagtttagaggatttaatataagaaatattgaataaatatacattttagagtgttgtatcagatgttgcatcattttttgagtgatgcaacacgtgagtgtaaaaagtaatcgtaggtgttgtatcatttttggtgatgcaacattgatgcaacaaatgatacaacacctctttcccttctcgctgtaaggttcaatcctgtttgtttccaatgttgcatcaaattcactataaagtttaaaaagtagtgttagggagtaaaggggtataggggtaaccctctaacagctatttttaaaagtttggcaagaattgatgcaacatcggaacacaaatataaattttgtatacaaggtgaataaatgaaagaatcgacattagaaaaatatttagtgaaagagataacaaagttaaatggattatgtttaaaatgggtcgcacctggaacaagaggtgtaccagatagaattattattatgccagaaggaaaaacatattttgtagaaatgaagcaagaaaagggaaagttacatcctttacaaaaatatgtgcatcggcaatttgaaaacagagatcatacagtgtatgtgttatggaataaagaacaagtaaatacttttataagaatggtaggtggaacatttggcgattgatttcaaaccacatagctatcaaaagtatgcaatagataaagtgattgataatgagaaatacggtttgtttttagatatggggctagggaaaacagtatcaacacttacagcatttagtgaattgcagttgttagacactaaaaaaatgttagtcatagcacctaaacaagttgctaaagatacatgggttgatgaagttgataagtggaaccatttaaatcatctgaaagtgtctttagtcttaggaacacctaaagaaagaaatgatgcattaaacacagaggctgatatctatgtaaccaataaagaaaatactaaatggttatgcgatcaatataaaaaagaatggccatttgatatggttgtaattgatgaactgtctacatttaaaagtcctaagagtcaaaggtttaaatctataaaaaagaaattaccactcattaatagatttataggattaacaggaacacctagcccaaatagtttgcaggatttatgggctcaagtttatttgatagacagaggtgaaagacttgagtcttcattcagtcgttatcgagaaaggtactttaaaccaactcatcaagttagcgaacatatttttaagtgggagctaagagacggatctgaagaaaagatatataaacaaatagaagatatatgtttaagcatgaaagcgaaagattatctggatatgcctgacagagttgatactaaacaaacagtagtcttatcagaaaaagaaagaaaagtatatgaagaattagaaaaaaactatattttagaatcggaagaagaaggaacagttgtagctcaaaatggggcatcattaagtcagaaactacttcaactatctaacggcgcagtttatacagatgaggaagatgtaagacttatacatgataagaagttagataagttagaggaaattatagaggagtctcaaggccaaccaatactattgttttataacttcaaacacgataaagaaagaatacttcaaaggtttaaggaagcaaccacattagaggattcaaactataaagaacgttggaacagtggagacattaagttgcttatagcacatccagcaagtgcaggacatggattaaacttacaacaaggtgggcacattattgtttggtttggacttacatggtccttggaattataccaacaagcaaatgctagattatacagacaaggacaaaatcatacgactattattcatcatatcatgaccgataacacaatagatcaaagagtatataaagctttacaaaataaagaactaacgcaagaagaattaatgaaagctattaaagctattaaagcaagaatagctaagcataagtaatggaggtctaacatggggaacacaatatatgatatcaagccaggaacatttaaatatattgaatcagaaatatataatttaaatgagaacaagaaagagataaatagattgagaatggagatacttaacccaacgaaagagctagacactaacattgtgtatggaccgttgcaaaaaggtgaaccagttagaacaactgaactaatggcaacaagattattgactaataagatgttacgaaacctagaagaaatggtcgaagcagttgaaagtgaatacttaaagttacctgaagatcataagaaagtaataaggttaaagtattggaatagagataagaagctaaagatagagcaaataggagatgcatgtcacatgcatcgcaatacagttactacaatacgaaagaactttgttaaagcgatagcttatcatgcaggtatcaaataacattgtgcaaagattgtgcaaaaggcctacaaatctgtgctaatatgttagtgtgggacaaaaagatgtataggctccttacgataatagacgaaacatgtatatgaggcacatcactttgtggtgtgtcttttgttgtacgattagtgaggtgtgagtaatgacgaaacaaaacaacacctataagcatggacgtaagtcttaccgatatgattggttctatcattctaaagcatggaaaaagctaagagaaatagcactagatagggataacaacctatgccaaatgtgcttgcgtgaagggaaaattacagatgcaaacatagtgcatcacattgtgtatgtaacagaagacttcagtaaagctttagatttagaaaatttgatgtcagtttgctatacctgtcataaccaaattcatgcaaatgataaaaacaaagataaatataaaaataaaaagtttcgagttgaaaagatttaaataaaagaattataaaataatttttaatcccccctacctggtggggaattccattttacaccgggaaccggtgaaggcaggaacgagagcagcgcggataatttttcatgaaagggggttttcttatgaaattaacaaaaaaacagctgaaagaatatattgaagactacaaaaaatctgacgatatgttaattaatttatatttagaaacatatgaattttattgtcgattacgggatgaattgaaaaacagtgatttgatgatggagcataccaataaagctggagcaagtaatattgttaagaatccattaagtattgaactgacaaaaacagttcaaacactaaataacttactcaagtctatgggtttaactgcagcacaaaggaaaaagatagtgcaagaagaaggtggatttggtgactattaaaatattaaatgaaccttcaccaaaactattaacaacatggtatgcagagcaagtcactcaagggaaaataaaaacaagcaaatatgttagaaaagaatgtgataggcatcttagatatttagaaaatggaggtaaatgggtatttgatgaagaattagcgcatcgtcctattcgattcatagaaaagttttgtaaaccttccaaaggatctaaacgtcaacttgtattacagccttggcaacattttattataggtagcctttttggttgggttcataaagaaacaaaactgcgcaggtttaaagaagctttgatatttatggggcgaaaaaatggtaaaacaactactatatctggtgttgctaactatgctgtttctcaagatggagaaaacggcgctgaaatccatcttttagcaaacgtaatgaaacaagctagaatattattcgatgaatctaaggcgatgataaaagctagcccaaagcttgataaaaatttcagaacattaagagatgaaatccattatgacgcaacgatatcaaaaattatgccccaagcatcagatagcgataagttagatggattgaatacacacatggggatttttgatgaaattcatgaatttaaagactataaattgatttcagttataaaaaactcaagagctgcaaggttacaacctcttctcatctacattacgacagcagggtatcaattagatggtccacttgttgatatggtagaagcgggaagagacaccttagatcaaatcatagaagacgaaagaactttttattatttagcatctttggatgatgacgatgatattaatgattcgtcgaactggataaaagcaaatcccaacttaggtgtctctataaatttagatgagatgaaagaagagtgggaaaaagctaagagaacaccagctgaacgtggagattttataaccaaaaggtttaatatctttgctaataatgacgagatgagttttattgattacccaacactccaaaaaaataatgaaattgtttctttagaagagctggaaggcagaccatgcacgattggttatgatttatcagaaacagaggactttacagccgcgtgtgctacttttgcgttagataatggtaaagttgcagttttatcgcattcatggattcctaagcacaaagttgaatattctaacgaaaaaataccctatagagaatgggaagaagatggcttattaacagtgcaagataagccttatattgactaccaagatgttttaaattggataattaagatgaatgagcattatgtagtagaaaaaattacttatgatagagcgaacgcattcaaactaaatcaagagttaaaaaattacgggtttgaaacggaagaaacaagacaaggagctttgaccttgagccctgcattgaaggatttaaaagaaatgtttttagatgggaaaataatatttaataataatcctttaatgaaatggtatatcaataatgttcagttgaaactagacagaaacggaaactggttgccgtctaagcaaagcagatatcgtaaaatagatggctttgcagcatttttaaacacatatacagatattatgaataaagttgtttctgatagtggtgaaggaaacatagagtttattagtattaaagacataatgcgttaaggaggtgaatgttatcgcaaaagagaatattgtcacacgcataaagaaaaaattgatagacaattggattgatcagtcaacttctaagctttatgactttagcccatggaaaaatagatctttttggggtgtaattaataatacgcttgaaactaatgaaacgatattttcagctattacaaagttatctaattcgatggctagtttgcccttgaaaatgtatgaagattataaagtagttaatacagaagtatctgatttacttacagtgtcaccgaataattctctgagcagttttgattttattaatcaaattgaaacaatcagaaatgaaaaaggtaatgcatatgtgctaattgaacgagacatctatcatcaaccatcaaagcttttcttattaaatccagatgttgttgaaatgttaattgaaaaccaatcacgtgaactttattattccattcatgctgcaactggaaataaattgattgttcataatatggacatgttgcattttaaacacatcgtggcatctaatatggtgcaaggcattagtccgattgatgtgttgaagaatacaactgattttgataatgcagtaagaacctttaatcttacagaaatgcaaaaacctgattctttcatgcttaaatatggttccaatgtaggtaaagaaaaaaggcagcaagtgttagaagatttcaaacagtactatgaagaaaacggtggaatattattccaagagcctggtgttgaaatcgaaccgctacctaaaaaatatgtctctgaagatatagtagcaagtgaaaatttaacaagagaaagagtagctaacgtttttcaattgccctcagtatttttaaacgcaaaatcaaatacaaatttcgcgaaaaatgaagagttaaacagattttacttgcagcataccttattgccaatcgtcaaacagtatgaagaagaatttaatcggaaactacttactaaaacagacagagaaaaaaataggtattttaaatttaacgttaaatcttatttaagggctgatagtgcaacacaagcagaagtgtactttaaagcagttcgtagtggttactacactataaatgacattagagagtgggaagatttaccaccagttgaaggtggagataagccgctaataagcggtgatttatacccaattgacacgccacttgaattaagaaaatctttgaaaggtggtgataaaaatgtcaatgaaagctaagtattttcaaatgaaaagaaaatcaaaaagtaaaggtgaaatatttatttatggtgatattgtaagtgataaatggtttgaaagtgatgtaactgctacagatttcaaaaataaactagatgaactaggagacatcagtgaaatagatgttcatataaattcatctggaggcagtgtatttgaagggcatgcaatatacaatatgctaaaaatgcatcctgcaaaaattaatatctatgtcgatgccttagcggcatcaattgctagtgttatcgctatgagtggtgacactatttttatgcacaaaaatagttttttaatgattcataattcatgggttatgactgtaggtaatgcagaagaattaagaaagacagcggatttacttgaaaaaacagatgctgttagtaattcagcttatttagataaagcaaaagatttagatcaagaacacttaaaacagatgttagatgcagaaacttggcttactgcagaagaagccttgtctttcggcttgatagatgaaattttaggagctaatgaaatagctgctagtatctctaaagagcaatataagcgtttcgagaacgtcccagaagatttaaagaaagatgtagacaaaatcactaaaattgatgatgtagatacatctgaattggttgaaacacctaaagaaagtatgtcactagaagaaaaagaaaaaagagaaaaaattaaacgcgaatgcgaaattttaaaaatgacaatgaattattaggaggaaatgaaatgccgacattatatgaattaaaacaatccttaggtatgattggacaacaattaaaaaataaaaatgatgaattgagtcagaaagcaacagatccaaatattgatatggaagacatcaaacaactagaaacagaaaaagcaggtttacaacaaagatttaacattgttgaaagacaagtgcaagacattgaagagaaagaaaaagcgaaagttaaagataaaggagaagcttatcaatctttaagtgataatgagaagatggttaaagctaaggcagagttttatcgtcacgcgattttaccaaatgaatttgaaaaaccttcaatggaggcacaacgtttattacacgctttaccaacaggaaatgattcaggtggagataagctcttaccaaaaacactttctaaagaaattgtttcagaaccatttgctaaaaaccaattacgtgaaaaagctcgtctaactaacattaaaggtttagagattccaagagtttcatacactttagacgatgatgatttcattacagacgtagaaacagcaaaagaattaaaagcaaaaggtgatacagtcaagttcactactaataaattcaaagtatttgctgcaatttcagatactgtaattcatggatcagatgtagatttagtaaactgggttgaaaacgcactacaatcaggattagcagctaaagagcgtaaagatgccttagcagtaagtcctaaatctggattagaacacatgtcattttataatggatctgttaaagaagttgagggagcagacatgtatgatgctattattaacgctttagcagatttacatgaagattatcgtgataacgcaacaatttatatgcgatatgcagattatgtcaaaattattagtgttctttcaaatggaacaacaaatttctttgacacaccagcagaaaaagtatttggcaaaccagtagtatttacagatgcagcagttaaacctattgtgggagatttcaattattttggaattaactatgatggaacaacttatgacactgataaagatgttaaaaaaggcgaatatttgtttgtattaacagcatggtatgatcagcaacgtacattagacagtgcattcagaattgcaaaagcaaaagaaaatacaggtccattacccagctaagccccaaaaggttaatgtaacagctaaggctaaatcagctgtaatatcagccgaataggggtgatgaaatgagtttagaagaaattaaattgtggttgagaattgactataatttcgaaaatgatttaattgaaggtctcattcaatcggctaagtctgaattactattaagtggggttccagattatgacaaagatgacttggaatacccgcttttttgtacagcgattaaatatatcattgcaagagattatgaaagtcgtggatactcaaatgaccaatctagaagcaaggtgtttaatgaaaaaggattgcaaaaaatgattttgaaattaaaaaagtggtaggtgatttttaaatggaatttaatgaatttaaagatcgcgcgtatttttttcaatatataaacaaaggaccatatccagatgaagaggaaaaaatgaaattgtatagttgcttttgtaaaatttataatccttctatgaaagatagagaaattttaaaagcgactgaatcaaaatcaggattaaccataattgtcaggtcttctaaaactgaatatctaccacaaacaaatcacttagttaaaattgacagtgcattatattccgataaattattcaacattgtagaaataagaattgatacaccagatattggctataatacagtggttttatcagaaaaatgagtgtagaaattaaagggatacctgaagtgttgaataaattagaatcggtatacggtaaacaagcaatgcaggctaagagtgataaagctttaaatgaagcatctgaattttttataaaggctttaaagaaagagttcgagagctttaaagatacgggtgccagtatagaagaaatgactaaatctaagccttatacaaaagttggcagtcaagaaagggctgttttaattgaatgggtaggccctatgaatcgcaaaaacattattcacttgaatgaacatggttatacaagagatggaaaaaaatatacaccaagaggttttggagttattgcaaaaacattagctgctagcgaacgtaagtatagagaaattataaaaaaggagttggccagataaatgaatatattaaacaccataaaaggaattttattatctgatgcagagctcaaaacacatataaattctagaatatactattacaaagtcactgaaaacgctgaaacttccaaaccctttgttgttattacacctgtttatgatttgccttcagactttatgtctgataaatatctcagtgaagaatacttaattcaaatagatgtagaatcttcaaataatcagaaaacaattgatataacaaaacgaataagatacctgttatatcaacaaaatttaattcaagcatctagtcagttagatgcttattttgaagaaactaaacgttatgtgatgtcgagacgatatcaaggcatacccaaaaatatatattataaaaatcagcgcatcgaataggtgtgctttttaatttttaaggaggaaataagcaatggcagaaggacaaggttcttataaagtaggttttaaaagattatacgttggagtttttaacccagaagcaacaaaagtagttaaacgcatgacatgggaagatgaaaaaggtggtacagttgacctaaatatcacaggtttagcaccagatttagtagatatgtttgcatctaacaaacgtgtatggatgaaaaaacaaggtactaatgaagttaagtctgacatgagtattttcaatattccaagtgatgatttaaacacagttattggacgtactaaagataaaaatggtacatcttgggtaggagagaatacaagagcaccgtatgtaacagtaattggcgaatcggaagatggtttaacaggtcagccggtatatgtagccttacttaaaggtacttttagtttagattcaattgaatttaaaacacgaggtgaaaaagcagaagccccagaacctacaaaattaacaggtgactggatgaatagaaaagttgatgttgatggaacgtcacaaggtattgtatacggttatcatgaaggtaaagaaggagaagcagaattcttcaaaaaagtattcgttggatacacggacagtgaagatcattcagaggattctgcaggttcgttacccagctaatccccaaaatgttgaagtagcagttaattcaaaatctgcaacagtttcagcagaataggggctttcaaaataaatcaaaggagaataatttatgactaaaactttaaaggtttataaaggagacgacgtcgtagcttctgaacaaggtgaaggcaaagtgtcagtaactttatctaatttagaagcggatacaacttatccaaaaggtacttaccaagtggcatgggaagaaaatggtaaagaatctagtaaagttgatgtacctcaattcaaaaccaatccaattctagtctcaggcgtatcatttacaccagaaactaaatcaattatggtaaataccgatgacaatgttgagccaaacattgcaccaagcacagcaacgaataaaatattgaaatatacaagtgaacatccagaatttgttactgtagatgaaaatacaggagcaattcacggtgtagctgaaggtacttcagtaatcactgctatgtctactgatggaagcgataagtcaggacaaatttcagtgacagtaacaaacggatagggatttaaggcgcagtatatctgcgtcttttttatttgaataaaaggagctaatacaatgattaaatttgaaattaaagatcgtaaaacaggaaaaacagagagctatacaaaagaagatgtaacaatgggcgaagcagaaaaatgctatgagtatttagaattagtaaatcaagagaataaaaaagaagcacctaacgcaacaaaaatgagacaaaaagagcgacagttattagtagatttatttaaagatgaaggattgactgaagaagatgttctgaataagatgagtactaaaacttatacaaaagccttacaagatatatttcgagaaatcaatggtgaagatgaagaagattcagaaactgaaccagaagagatgggaaagacagaagaacaatctcaataaaagacattttatcgaacattaagaaaatacaacgtttctgtatggagcagtatgggtggacattaactgaagtcagaaaacagccgtatgtaaaacttttagaaatacttaatgaagagaataaagaagagactgaagaaaaacaaagtgaacaaaaagtcattacaggtacggatttaagaaaactttttggaagctagaaaggaggttaatatgaatgaaaaagtagaaggcatgaccttggagctgaaattagaccatttaggtgtccaagaaggcatgaaaggtttaaagcgacaattaggtgttgttaatagtgaaatgaaagctaatctgtcagcatttgataagtctgaaaaatcaatggaaaaatatcaggcgagaattaaggggttaaatgataggcttaaagttcaaaaaaagatgtattctcaagtagaagatgagcttaaacaagttaacgctaattaccaaaaagctaaatccagtgtaaaagatgttgagaaagcatatttaaagttagtagaagccaataaaaaagaaaaattagctcttgataaatctaaagaagccttaaaatcatcgaatacagaacttaaaaaagctgaaaatcaatataaacgtacaaatcaacgtaaacaagatgcgtatcaaaaacttaaacagttgagagatgcagaacaaaagcttaagaatagtaaccaagctactactgcacaactaaaaagagcaagtgacgcagtacagaagcagtccgctaagcataaagcacttgttgaacaatataaacaagaaggcaatcaagttcaaaaactaaaagtgcaaaatgacaatctttcaaaatcaaatgataaaattgaaagttcttacgctaaaactaatactaaattaaagcaaacagaaaaagaatttaatgatttaaacaatactattaagaatcatagcgctaatgtcgcaaaagctgaaacagctgttaataaagaaaaagctgctttaaataatttggagcgttcaatagataaagcttcatccgaaatgaagacttttaacaaagaacaaatgatagctcaaagtcatttcggtaaacttgcaagtcaagcggatgtcatgtcaaagaaatttagttctattggagacaaaatgacttccctgggacgtacaatgacgatgggcgtatctacaccaattactttagggttaggtgcagcattaaaaacaagtgcagactttgaaggccaaatgtctcgagttggagcgattgcgcaagcaagcagtaaagacttgaaaagcatgtctaatcaagcagttgacttaggagctaaaaccagtaaaagtgctaacgaagttgctaaaggtatggaagaattggcagctttaggatttaatgccaaacaaacaatggaggctatgccaggtgttatcagtgcagcagaagcaagtggtgcagaaatggctacaactgcaactgtaatggcttcagcgattaactctttcggtttaaaagcatctgatgcaaatcatgttgctgatttacttgcgagatcagcaaatgatagtgctgcagatattcagtacatgggagatgcattgaagtatgctggtactcctgcaaaagcattaggagtttcaatagaggacacttccgcagcaattgaagttttatctaactcaggtttagagggttctcaagcaggtactgccctaagagcttcatttatcaggctagctaatccaagtaaaaatacagctaaggaaatgaaaaaattaggtattcatttgtctgatgctaaaggtcaatttgttggcatgggtgaattgattagacagttccaagataatatgaaaggcatgacgagagaacaaaaactagctacagtggctacaatagttggtactgaagcagcaagtggatttttagccttgattgaagcgggaccagataaaattaatagctatagtaaatccttaaagaattccaatggcgaaagtaaaaaagcagcagatttgatgaaagataatctcaaaggcgctctggaacaattaggtggcgcttttgaatcattagcaatcgaagtcggtaaagatttaacgcctatgattagagcaggagcggaaggtttaacaaaattagttgatggatttacacatctccctggttgggttagaaaagcttcagtaggattagcactttttggtgcagcaattggacctgcagttcttgctggagggttattaatacgtacagttggaagtgctgctaaaggatatgcgtcattaaatagacgtattgctgaaaatacaatcctttcaaatactaattcaaaagcaatgaaatctttaggtcttcaaacattatttcttggttctacaacaggaaaaacgtcaaaaggctttaaagggttagccggagctatgatgtttaatttaaaacctataaatgttttgaaaaattctgcaaagctagcaattttaccgttcaaacttttgaaaaacggtttaggattagctgcaaaatctttatttgcagtaagtggaggcgcaagatttgcgggtgtagccttaaggtttttaacaggacctataggttctacaataactgctattacaattgcgtataaagtttttaaaaccgcatatgatcgtgtggaatggttcagaaacggtattaacggtttaggagaaactataaagttttttggtggtaaaattattggcggcgctgttagaaagctaggagagtttaaaaactatcttggaagtatcggcaaaagcttcaaagaaaagttttcaaaagatatgaaagatggttataaatcattaagcgacgatgaccttctcaaagtaggagtcaacaagtttaaaggatttatgcaaaccatgggcacagcttctaaaaaagcgtctgatactgtaaaagtgttagggaaaggtgtttcaaaagaaacagaaaaagctttagaaaaatatgtgcattattctgaagaaaatagcagaatcatggaaaaagtacgtttaaactcgggtcagatatcagaagacaaagcaaaaaaacttttgaaaattgaaacggatttatctaataaccttatagctgaaatagaaaaaagaaataaaaaggaactcgaaaaaactcaagaacttattgataagtatagtgcattcgatgaacaagaaaagcaaaacattttaactcgaactaaagaaaaaaatgacttgcgaattaaaaaagagcaagaactcaatcagaaaatcaaagaattgaaagaaaaagctttgagtgatggtcagatttcagaaaatgaaagaaaagaaattgaaaagcttgaaaatcaaagacgtgatatcactgttaaagaattgagtaagactgaaaaagagcaagagcgtattttagtaagaatgcaaagaaacagaaatgcttattcaatagacgaagcgagcaaagcaattaaagaagcagaaaaagcaagaaaagcaagaaaaaaagaagtggacaagcaatatgaagatgatgtcattgctataaaaaataacgtcaacctttctaagtctgaaaaagataaattgttagctattgctgatcaaagacataaagatgaagtaagaaaagcaaaatctaaaaaagatgctgtagtagatgttgttaaaaagcaaaataaagatattgataaagaaatggatttatccagtggacgtgtatataaaaatactgaaaagtggtggaatggccttaaaagttggtggtctaactttagagaagaccaaaagaaaaaaagcgataaatacgctaaagaacaagaagaaacagctcgtagaaacagagaaaatataaagaaatggtttggaaatgcttgggacggcgtaaaaagtaaaactggcgaagcctttagtaaaatgggcagaaatgctaatcattttggcggcgaaatgaaaaaaatgtggagcggaatcaaagggattccaagcaaattaagttcaggttggagctcagccaaaagttctgtaggataccacactaaggctatagctaatagtactggtaaatggtttggaaaagcttggcaatctgttaaatcgacaacaggaagtatttacaatcaaactaagcaaaagtattcagatgcttcagataaagcttgggcgcattcaaaatctatttggagaggcacatcaaaatggtttagcaatgcatataaaagtgcaaagggctggctaacggatatggctaataaatctcgcgcgaaatgggataatatttctagtacagcttggtcgaatgcaaaatccgtttggaaaggaacatcgaaatggtttagtaactcatacaaatctttaaaaggttggactggggatatgtattcaagagcccacgatcgttttgatgcaatttcaagttcggcatggtctaacgctaaatcagtatttaatggttttagaaaatggctatccaaaacatatgattggattagagatattggtaaagacatgggaagagctgcggctgatttaggtaaaaatgttgctaataaagctattggcggtttgaatagcatgattggcggtattaataaaatatctaaagccattactgataaaaatctcatcaagccaatacctacattgtctactggtactttagcaggaaagggtgtagctaccgataattcgggagcattaacgcaaccgacatttgctgtattaaatgatagaggttctggaaacgccccaggtggtggagttcaagaagtaattcacagggctgacggaacattccatgcaccccaaggacgagatgtggttgttccactaggagttggggatagcgtaataaatgctaatgacactctgaagttacagcgtatgggtgttttaccaaagtttcatggaggtacgaaaaagaaagattggctagaccaacttaaaggtaatataggtaaaaaagcaggagaatttggagctacagctaaaaacacagcgcataatatcaaaaaaggtgcagaagaaatggttgaagcagcaggcgataaaatcaaagatggtgcatcttggttaggcgataaaatcggcgatgtgtgggattacgtacaacatccagggaaactagtaaataaagtaatgtcaggtttaaatattaattttggaggcggagctaacgctacagtaaaaattgctaaaggcgcatactcattgctcaaaaagaaattagtagacaaagtaaaatcgtggtttgaagattttggtggcggaggcgatggaagctatctatttgaccatccaatttggcaaaggtttgggagttacacaggtggacttaactttaatggcggtcgtcactatggtatcgactttggtatgcctacaggaacgaacatttatgctgttaaaggcggtatagctgataaagtatggactgattacggtggcggtaattctatacaaattaagaccggtgctaacgaatggaactggtatatgcatttatctaagcaattagcaagacaaggccaacgtattaaagctggtcaactgatagggaaatcaggtgctacaggtaatttcgttagaggagcacacttacatttccaattgatgcaagggtcgcatccagggaatgatacagctaaagatccagaaaaatggttgaagtcacttaaaggtagtggcgttcgaagtggttcaggtgttaataaggctgcatctgcttgggcaggcgatatacgtcgtgcagcaaaacgaatgggtgttaatgttacttcgggtgacgtaggaaatatcattagcttgattcaacacgaatcaggaggaaatgcaggtataactcaatctagttcgcttagagacatcaacgttttacagggcaatccagcaaaaggattgcttcaatatatcccacaaacatttagacattatgctgttagaggtcacaacaatatatatagtggttacgatcagttattagcgttctttaacaacagatattggcgctcacagtttaacccaagaggtggttggtctccaagtggtccaagaagatatgcgaatggtggtttgattacaaagcatcaacttgctgaagtgggtgaaggagataaacaggagatggttatccctttaactagacgtaaacgagcaattcaattaactgaacaggttatgcgcatcatcggtatggatggcaagccaaataacatcactgtaaataatgatacttctacagttgaaaaattgttaaaacaaattgttatgttaagtgataaaggaaataaattaacagatgcattgattcaaactgtttcttctcaggataataacttaggttctaatgatgcaattagaggtttagaaaaaatattgtcaaaacaaagtgggcatagagcaaatgcaaataattatatgggaggtttgactaattaatgcaatcttttgtaaaaatcatagatggttacaaggaagaagtaataacagattttaatcagcttatatttttagatgcaagggctgaaagtccaaacaccaatgataacagtgtaactattaacggagtagatggtattttaccgggtgcaattagttttgcgcctttttcattagtattaaggtttggctatgatggtatagatgttatagatttaaatttatttgagcattggtttagatctgtgtttaatcgcagacatccttattatgttattacttctcaaatgcctggtgttaaatatgcagtgaatacagctaatgttacatctaatttaaaagatggttcttcaactgaaattgaagtaagtttaaatgtttataaagggtattctgaatcagttaattggaccgatagcgagttcttattcgactctaattggatgtttgaaaatggaattcctcttgatttcacacctaaatatactcatacatcaaatcaatttactatttggaacggttctactgatacgataaatccacgattcaaacacgatttgaaaatattaattaatttaaatgcgagtggaggatttgaactggttaattatacaacaggtgatatttttaagtacaacaaaagtatagataaaaacactgattttgttttagatggtgtgtatgcatatcgagatataaacagagtgggaattgatacaaatagaggcattataacattagcgccaggtaaaaatgaatttaagattaaaggagacgtcagtgatattaaaactacatttaagtttccttttatttataggtaggtgatttaatggattatcatgatcatttatcagtaatggattttaatgaattgatttgtgaaaatttactagatgtagattatggttcttttaaagaatattatgaactgaatgaagctaggtacatcacttttacagtttatagaactactcataatagttttgttttcgatttactaatttgtgaaaacttcataatttatcatggtgaaaaatacacaattaagcagacagcgccaaaggttgaaggtgataaagtttttattgaagttacggcatatcacataatgtatgaatttcaaaatcactcagtggaatcaaataagcttgatgacgacagtagcgaaactggtaaaacgccagaatactctttagatgagtacttaagatatggatttgcaaatcaaaaaacttcggtcaaaatgacctataaaataattggagattttaagcgaaaagtaccgattgacgaattaggtaacaaaaacggcttagaatactgtaaagaagcggtagacctgtttggttgtattatttatccaaatgatacggagatatgtttttattctcctgaaacattctatcaaagaagcgaaaaagtaataaggtatcaatataatactgatactgtgtctgctactgtcagtacgttggaattaagaacagctataaaaatttttgggaaaaagtacacagctgaggaaaagaaaaattataaccctattaaaacaactgacattaattattcaaatggtttcataaaagaaggcacttatcggactgaaacaattggttctaaagctactattaaatttaattgcaagtatggtaatgaaacagttagatttacaatcaaaaaaggttcccaaggtggaatatataagttgattttagacggcaaacaaattaagcaaatttcttgctttgctaagtcagttcagtctgaaacaatagatttaataaaaaatattgataaaggcaagcacgttttagaaatgatatttttaggagaagaccctaaaaacagaattgatatagcttcaaataaaaaagctaagccttgtatgtacgttggaactgaaaaatcaacagtcttaaatttaattgctgacaactcaggtcgcaatcaatacaaagcaattgttgactacgtcgcagatagtgcaaagcagtttgggattcgatatgctaatacgcaaacaaatgaagatatcgaaacacaggataagctgttagaatttgcaaaaaagcaaataaatgatactcctaagactgaattagatgttaattatataggttatgaaaaaatagagccaagagatagcgtattctttgttcatgaattaatgggatataacactgaattaaaggttgttaaacttgataggtcacatccatttgtaaacgcaatagatgaagtgtctttcagcaatgaaataaaggatatggtacaaattcaacaagcgcttaacagacgagttattgcacaagataatagatataactatcaagcaaatcgtataaatcatttatacactagtactttgaattctcctttcgagacaatggatatagggagtgtattaatataatggcaacagaagaagttaaaatcaaagcgctacttgaaaacgataaacagtactttccagctacacattggaaagctataaatgggataccttatgcaggcagtagtgatattgatggattgcctcaagacggtatcatttcggtagatgataaaaataaattagacaatttaaaaataggcgaagcaggaattattcaaaatagcattgtacagaaatccccaaacggtaaattgtggaaaataacagttgacgatagtgggaaacttggtacagtgctattttattagaaaggaaggtgcattatggaaaatttgtatttaataaaggatttgggagctttagcaggtcgagattatagagctaaggaaatacaaaacttacaaagaatagagcaatttgcgcttggcttgacaacagagtttaagttgcatcagaaagctaaaacaattcaacacttcgctgagcaaatttattataatggtagatcgcaagcagcagtaaacaaatctttacaaagtcaaattaacgcacttgttgtggcaccacgtaataacagtgctaatgagattgttcaagctcgagttaatgtaaacggcgaaacctttgacacattaaaagaacatttagacgattgggaaaccaaaactcaaattaataaagaggaaactataagagaattaaataagaccaaacaagaaattcttgatatcgagtatcgttttgaacctgataagcaagaatttttatttgtgacagaacttgcacctcttacaaatgcagtaatgcaatccttctggtttgataatagaacaggcatagtatacatgacacaagctagaaataatggctatatgctaagtcgtttaagacctaatggtcaatttatagacagctcattgattgtaggtgggggtcatggtacacataacggttatagatatattgatgatgagttatggatttatagttttatcttaaatggtaataatgagaatacattagttcgtttcaagtatacgcctaatgtggaaattagctatggcaagtatggtatgcaagatgtatttacaggacacccagaaaaaccctacatcacccctgtcataaatgaaaaagaaaataaaattctatacagaattgagagacctagaagtcagtgggaacttgaaaactcaatgaattatatagagataagaagtttagacgatgttgataaaaatattgataaagttttgcataaaatcagtatccctatgagactaacaaacgaaacccaaccaatgcagggtgtgacttttgatgaaaaatacttgtattggtatacaggagacagtaatccaaataatagaaactatttaacggctttcgatttagaaacaggagaagaagcgtatcaggttaatgctgactatggtggaacactagattcatttcctggcgaatttgcggaagcagaaggtttgcaaatatactatgacaaagatagtggtaaaaaagctttgatgctaggtgttactgtcggtggtgatggaaatagaacacatcgtattttcatgattgggcaaagaggtattttagaaatacttcactcaagaggcgttccttttatcatgagtgacacaggtggtagagttaaacctttaccaatgaggcctgataaacttaagaatcttgggatgttaacagagccaggtctttactatttatacactgatcatacagttcaaatcgatgatttcccattaccaagagaatggcgtgatgcaggttggttcttggaagttaagccaccacaaactggcggtgatgtaattcagatattgacgcgtaatagttatgcaaggaatatgatgacttttgaaagggttctttctggaagaactggagacatttcggactggaattatgtgcctaaaaatagtggtaaatgggagagagtaccttcattcatcacaaaaatgtcagatattaacatagtaggtatgtcgttttatttaactacggatgatacaaaacgttttacagattttccaactgaacgtaaaggggtagctggttggaacttatatgtagaagcttctaacacaggtggttttgttcataggctagttcgtaatagtgttacagcatcttgtgaaatattattgaagaactatgatagtaaaacaagttcagggccatggactttacacgaagggagaattataagttaatgagtaatttagagaaatctgtagctataaatttagaaaacacagcgcattatgaaaatatttcaaatctagatataacttttagaacaggagagagtgattcttctgttcttctttttaatatcactaaaaataatcaaccgttattcctgagtgaagaaaatatcaaagcacgaatagcgattcgaggtaaaggagttatggtggttgctccactagaaatattagatccatttaaaggcgtattaaaatttcaattacctaacgatgtaattaaacgagatggaagttatcaagctcaagtttcggttgcagaattagggaattcagacgtggtagttgtcgagagaactatcacatttaacgttgaaaaaagcttgtttagcatgattccatctgaaacaaaattacactatattgttgaatttcaggaattagaaaaaactattatggatcgtgcgaaagcaatggacgaggctataaaaaatggtgaagattatgcgagtctgattgaaaaagctaaagaaaaagggctatcagatattcaaatagcaaaatcgtcaagtatagatgaattaaagcaacttgcaaatagccgtataaccgatttggaaaataaagcgcaaacttattcaagagcattcgatgagcaaaagcgttatatggatgataaacatgaagcttttaagcaatctgtgaatagtggtggtttagtcacaagtggttcaacttcaaattggcaaaaagctaagattactaaagatgatggtaagataatgcagattactggatttgattttaataatccagaacaaagaataggcgattcgactcaatttatttatgtttcgcaagctataaattatccaagaggcgcaagcactaatggtactgtcgaatatttagtagtaacttccgactacaaacgtatgacatatcgtccaaatggtacaaataaagtatttgttaagagaaaagaaatgggttcgtggtctgattggtcagaattagcgcttaatgattacaacacaccttttgaaactgttcaaaacgcgcaatcaaaggctaacacggctgaaagcaatgccaaactatacacagatgacaagtttaataaaagatattcagttatttttgatgggacggcaaatggcgttggctcaacattatatcttaatgaaagtttagatcaatttattttgttaattttttatggaacttttccaggtggagattttactgagtttggcaacccctttggtggcggaaaaatttcattgaacccatcaaatttaccggataatgacggtgacggtggaggcgtttatgagtttggattaactaaatctagtcgtacatcattaactatatcaaacgatgtttattttgacttaggaagtcgaagaggttctggtgcaaatgcaaatagaggaacaatcaacaaaattataggagtgagaaaataatgcaaatattagttaacaagcgtaatgagataatttcatacgctatcattggtggctttgaagaaggtattgatattgaaaatttaccagaaaatttctctcaagtttttagacctaaagcctttaaatattcaaatggggaaatagtttttaacgaagattattcagaagaaaaagatgacttgcatcaacagattgacagtgaagaacaaaacacagtcgcttctgatgacatcttacgaaaaatggttgctagtatgcagaaacaagttgttcaaagtacaaagttatcgatgcaagttaataagcaaaatgcactaatggcaaaacaacttgtgacacttaataaaaaattagaagaggttaaaggagagactgaaaatgcttaaattaatttcaccaacattcgaagatattaaaacatggtatcaattgaaagaatatagtaaagaagatatagcgtggtatgtagatatggaagttatagataaagaggaatatgcaattattacaggagaaaagtatccagaaaatctagagtcataggttataatcttatggctttttaatttgaataaagtgggtggtgtaatgtttggatttaccaaacgacacgaacaagattggcgtttaacgcgattagaagaaaatgataagactatgtttgaaaaattcgacagaatagaagacagtctgagaacgcaagaaaaaatttatgacaagttagatagaaatttcgaagaactaaggcgtgacaaagaagaagatgaaaaaaataaagagaaaaatgctaaaaatattagagacatcaagatgtggattctaggattaatagggacgattctaagtacatttgttatagccttgttaaaaactatttttggcatttaaaggaggtgattaccatgcttaagggaattttaggatatagcttttggtcgtgtttctggtttagtaagtgtaagtaatagttaagagtcagtgctttggcactggctttttattttggataaaaggagcaaacaaatggatgcaaaagtaataacaagatacatcgtattgatcttagcattagtcaatcagtttttagcgaataaaggtataagtccgataccagtagatgaagaaagtgtttcatcgattatcttaacagttgttgctttatatactacatataaagataatccaacatctcaagaaggtaaatgggcaaatcaaaagctaaagaaatataaagctgaaaacaagtatagaaaagcaacagggcaagcgccaattaaagaagtaatgacacctacgaatatgaacgacacaaatgatttagggtaggtgatgatttatgttaatgacaaaaaaccaagcagaaaaatggtttgataattcattagggaagcagttcaatcctgatttgttttttggatttcaatgttacgattacgcaaatatgttttttatgttggcaacaggcgaaaggttacaaggtttatacgcttataatattccatttgataataaagcaaggattgaaaaatacgggcaaataattaaaaactatgatagctttttaccgcaaaagttggatattgtcgttttcccgtcaaagtatggtggcggagctgggcacgttgaaattgttgagagcgcaaatttaaacactttcacatcatatgggcaaaattggaatggtaaaggttggacaaatggcgttgcgcaacctggttggggtcctgaaactgttacaagacatgttcattattacgatgacccaatgtattttattagattaaatttcccagataaagtaagtgttggagataaagctaaaagcgttattaagcaagcaactgccaaaaagcaagcagtaattaaacctaaaaaaattatgcttgtagccggtcatggttataacgatcctggagcagtaggaaacggaacaaacgaacgcgattttatccgtaaatatataacgccaaatatcgctaagtatttaagacatgcaggtcatgaagttgcattatatggtggctcaagtcaatcacaagacatgtatcaagatactgcatacggtgttaatgtaggaaataataaagattatggattatattgggttaaatcacaggggtatgacattgttctagagattcatttagacgcagcaggagaaaatgcaagtggtgggcatgttattatttcaagtcaattcaatgcagatactattgataaaagtatacaagatgttataaaaaataacttaggacaaataagaggtgtaacacctcgtaatgatttactaaacgttaatgtatcagcagaaataaatatgaattatcgtttatctgaattaggttttattactaataaaaaagatatggattggattaagaagaattatgacttgtattctaaattaatagctggtgcgattcatggtaagcctataggtggtttggtagctggtaatgttaaaacatcagctaaaaaccaaaaaaatccaccagtgccagcaggttatacacttgataagaataatgtgccttataaaaaagaggatggtaattacacagttgccaatgttaaaggtaataacgtaagggacggctattcaactaattcaagaattacaggtgtattacctaataacgcaacaatcgaatatgacggcgcatattgcatcaatggctatagatggattacttatattgctaatagtggacaacgtcgttatatagcgacaggagaggtagacaaggcaggtaatagaataagtagttttggtaagtttagcacgatttagtatttacttagaataaaaattttgctacattaattatagggaatcttacagttattaaataactatttggatggatgttaatattcctatacactttttaacattactctcaagatttaaatgtagataacaggcaggtactacggtacttgcctatttttttgttataatgtaattacattaccagtaaccaatctggcttaaaaccacatttccggtagccaatccggctatgcagaggacttacttgcgtaaagtagtaagaagctgactgcatatttaaaccacccatactagttgctgggtggttgttttttatgttatattataaatgatcaaaccacaccacctattaatttaggagtgtggttatttttgttttttttcagggcaaaaaaagggcagattatttaaataagagcaaacacgagtggaaaatatttaaagttaaagtgataaaaactttgatattacagcgtttttaaacgttcgtgtacgtttgagaatggccgttttaccattaggtgttaatgtgtcataatgataagtgattttattgaatggagtggacattagtggatattggtaaaaaacatgtaattcctaaaagtcagtaccgacgtaagcgtcgtgaattcttccacaacgaagacagagaagaaaatttaaatcaacatcaagataaacaaaatatagataatacaacatcaaaaaaagcagataagcaaatacataaagattcaattgataagcacgaacgttttaaaaatagtttatcatcgcatttagaacagagaaaccgtgatgttaatgagaataaagctgaagaaagtaaaagtaatcaggatagtaagtcagcatataacagagatcattatttaacagacgatgtatctaaaaaacaaaattcattagattcagtggaccaagatacagagaaatcaaaatattatgagcaaaattctgaagcgactttatcaactaaatcaaccgataaagtagaatcaactgacatgagaaagctaagttcagataaaaacaaagttggtcatgaagagcaacatgtactttctaaaccttcagaacatgataaagagactagaattgattttgagtcttcaagaactgattcagacagctcgatgcagacagagaaaataaaaaaagacagttcagatggaaataaaagtagtaatctgaaatctgaagtaatatcagacaaatcaaatacagtaccaaaattgtcggaatctgatgatgaagtaaataatcagaagccattaactttgccggaagaacagaaattgaaaagacagcaaagtcaaaatgagcaaacaaaaacctatacatatggtgatagcgaacaaaatgacaagtctaattatgaaaatgatttaagtcatcatatgccatcgataagtgatgataaagataacgtcatgagagaaaatcatattgttgacgataatcctgataatgatatcaatacaccatcattatcaaaaacagatgacgatcgaaaacttgatgaaaaaattcatgttgaagataaacataaacaaaatgcagactcgtctgaaacggtgggatatcaaagtcagtcaagtgcatctcatcgtatcactgaaaaaagaaataatgctattaatgaccatgataaattaaacggtcaaaaaccaaatgcaaagacatcggcaaataataatcaaaaaaaggctacatcaaaattgaacaaagggcgcgctacaaataataattatagtgacattttgaaaaagttttggatgatgtattggcctaaattagttattctaatgggtattattattctaattgttattttgaatgctatttttaataatgtgaacaaaaatgatcgcatgaatgataataatgatgcagatgctcaaaaatatacgacaacgatgaaaaatgccaataacacagttaaatcggtcgttacagttgaaaatgaaacatcaaaagattcatcattacctaaagataaagcatctcaagacgaagtaggatcaggtgttgtatataaaaaatctggagatacgttatatattgttacgaatgcacacgttgtcggtgataaagaaaatcaaaaaataactttttcgaataataaaagtgttgttgggaaagtgcttggtaaagataaatggtcagatttagctgttgttaaagcgacttcttcagacagttcagtgaaagagatagctattggagattcaaataatttagtgttaggagagccaatattagtcgtaggtaatccacttggtgtagactttaaaggcactgtgacagaaggtattatttcaggtctgaacagaaatgttcctattgatttcgataaagataataaatatgatatgttgatgaaagctttccaaattgatgcatcagtaaatccaggtaactcgggtggtgctgtagtcaatagagaaggaaaattaattggtgtagttgcagctaaaattagtatgccaaacgttgaaaatatgtcatttgcaatacctgttaatgaagtacaaaagattgtaaaagatttagaaacaaaaggtaaaattgactatcccgatgtaggtgttaaaatgaagaatattgccagtctaaatagttttgaaagacaagcagttaaattgccaggaaaagttaagaacggtgttgttgtagatcaagttgacaacaatggtttagcagatcaatctggtctgaaaaaaggtgatgtaattactgaattagatggcaaacttttagaagatgatttacgctttaggcagattatatttagtcataaagatgacttgaaatcaattacagcgaagatttatagagatggtaaagagaaagaaattaatattaaactaaaataatgttgaggtgaacaacgtgtcaatttttagccagtttttaaaaagatcaagccctcaacaaggtattgtattgtactatatcgtcgcaattgtcattgcatttttattattaaacttaccgtatgttcataaaccaggtgtagaagtaaatccaattgacacattatttgttgccgtatccggaattagtgttactggattgtctccgataagtattgtcgatacctattctacatttggacaattaattatcctcgtgatattaaatattggtggaattggcgtcatggcaattggtacgatgttatgggtggtactaggtaaacatattggaattagagaacgtcagttaattatgttagataataacaaaaacacaatgagtggtaccgtcaaattgattattgatattgtaaaatcaatatttgtaatcgaactcgtaggagccatgttattagcattttacttttatcgagataatccagatttaaaatatgcaatcatgcaaggtgtttttgtttctatttctgccactaccaatggtggattagatattacaggtaagtcattaattccttatgcacatgattattttgtacaagcgatagttatatttttaataattttaggatcaatcggcttcccagtattattagaagttaaagcttatattcaaaatagggttactaattttagattttcattatttactaaaattacgacatcaacatatttattcctatttattgttggggtattagccattctattatttgaacataaccatgcgttcaaaggattaagttggcatcaatcgttattctattcgctgtttcaatcagcgactacaagaagtgcgggtcttcaaacaattgatgtgacaacactaagtgaccccactaatattatcatgggtattttaatgtttataggatcttcgccaagttcggttggtggcggtattcgtacaacaactttcgctattttaattttgtttttaattaactttagtaataatgccgataaaacatccattaaagtttacaatagagaagtacacattatggatattcaacgttcatttgcagtatttacaatggcgacaattttaacatttttaggaatgctaattatatcagctactgaaaatggtaagcttacatttttacaagtattttttgaagtcatgtctgcatttggaacttgtggactatcgcttggtgtcacaagtgatattagtgatatttctaaggtcgtactaatgatactcatgtttataggacgtgttggcttaatatcatttatcattatgatagcaggacgtcgagaaccagataaattccattatccaaaagaacgtattcaaataggataatataatagcaatctaagtttagttaatgtagattttaactggaacttagattgcttttttagtttgtatttttaacttattttataagacgattggtttcgaaaatggtaaactagtaacaatgagaggtgtaacatgatggaaaaaaatgaaaacattaatgtagagattttaactacgtcagatatgcatagtcatttcttaaatggtgattatggttcaaatatttatagagctggtacttatgttaaccaagtaagagcacaaaatcatcgcgtcattttattagatagtggcggaagtttagctggctcgttagcggcctattattatgctattgttgcaccttataaacgacatccaatgataaagttaatgaacagaatgcattatgatgctagcggtgtgagtccaagtgaattcaagtttggtttatcatttttaactcgttcaattgctttggcacgttttccatggttatcagcaaatattgaatacaatgttactaaggagccttatttttcaactccatattgtattaaacattttggtgacttaaaaattgctatcgtaggcgttacagcagatggtttaatggaaaatgagtattctgaaatggagcaagatgtatctattgaaaagacattagtggcatcaaaacgatggattagatatatccatgaagttgaagagccggattttttgattgtaatttatcatggtggattgaataaaattagtaatagtacgaaaaataaaaaggcaagttcgaatgaagctgaaaaattaatggaagaactcggtgttatagatttaatgattacagctcatcagcatcaaacaatagtcggtcaagatcatgaaacgtattatgttcaggctggtcaagatgcaaaagagcttgtacatctttcgattaattttaaaaagagaacaacaacttatgatgttgaaagcattgattctaaagtgattgacttaaatgagtatgaagaggaccaagaattattagatttaacattctatgatagaaaagcagtggcttattggtcacaggaaatcataagtgataaaggtttgatgttatcagtaaatgggttacaagatttagtctgtcaaacacatccattttcacaattattacatgatgcaattcaccttgcatttgatgatgatataacatgtgtccacgtgcctatgaacggagagaaggggttgagtggacagattcgaaatgaagatttgtatcatgcatacccatatccagataagccaatggatatgacaattagtggtcaaaatatcaaagatatattggagtatagttattcacatttagattttgttaacgagcaattaagcttaacaattattgatgaaacgttatgtacaatgtggcaaggattcaattatgagattgatatgaatcaagaacctgggcaacgagtaatgttagatcaaattgatttgagtaagagttatagagttacaatgactgactattgttatcgtaactacaagaattatttaaaaaatgctattatacatgaatcatacgatgaaacaatgagtacattaattgcagagaagttaagagatccgaattatcatatttcatgtagtgataattttatagttaaaaacaggtaaatattgctatgtaataaattaattataagttcaacaagtataaaaacctttcttagagaagattatctaggaaaggtttttagaattttaaaattgatataaaagaacagtgaaattctcattcattatatataagtaaacaaaaaagctaaaatggtatataccattttagcaagtaacggaaacggagggattcgaaccctcgcgccgctttcgcgacctacacccttagcaggggcgcctcttcagccaacttgagtacgtttccaatggctccacaggtaggactcgaacctacgaccgatcggttaacagccgatagctctaccactgagctactgtggattaatttgtatgtgtttgaatatcaagcacaaatattattataacaagattaagttaatttgcaatagataccttaaaaaaatatgcagaacatttacactatatttataaaacattccgcatattttaaaaataaacaatttatttatcttcaaataaagaatagcgtgtcaatgcttcaaacacattcaatgtggctttattataatctattggttggtcgggattttttgatatcatgcgagattgtttatctaccctgtaatagtaaaaaatggaattgttatattgatgccataaactgtggtatgaaacatgaagaatgattgattcattattaataaatgtcactttacatttacgattttttaattctttaatactttcgatataatgcatatttaaccaaatattttcattttgtctgtcagaatgtgttgggaaaaaataagttggaaataatggtgttagtaaaataggtggtttactagaaatgccagtaatgcggtttgtctctgctttcttgccaagataagtattaccataaaatttgcaagagcgttcaatgattttctggactttaaaaggattttgaatacgcgttttgtcaaaccgaattatttcactaccgtttctttgatcgtcatcatcaaatgctggtcgaataaccatgtctcctttgcgtatcacataaatattttgagaatacataagcaaaacctcgctttattaagttttaaaccattaatataaaaatacaattaatgatataaagatattttataataaaattctgagttgtcaagttattattttggtgaaaatgtacaataatttttaactaatagtcagaatattcattgatttcaaaattagaaaaatgtatacttattataaattaaagaaaggtagtggtttctatgaaatacaatactaatgttaaacatacaactttagaagcgtttgtcacaaccgtcaatgatttgggtattgaattaattatcaatgaagcacttcgagaggtaagaaaacgacagctcatagaacttatagatgacgcactcgtcaataaagatgaagcagcatttaatcaatatacggcagaatacaaaaatttggaggcatttctcggtgaataacattgattcgaattccataacgcaatcataaaaggactattcttaacatctcatacatgtaagaatagtcctttaatcgtttatgacattaatctaattaattcatgtctatctatgtcaccgaaatagtgatataaatcatattctgatagtgcttcttctatgtgctcaaagtcgtgtagacagccaactaatgcattttcaagatcagtgacatctccgacaccaaagaaatcaccgaaaatttttgcatgttcgattttacctcgtttaacatcaaacttaatttgtacaaatcctttttcaaatttttcctcgcgttcaaagttatatttagggtttctaccataattccattcccaagttctatatttgtcgttacttaacttttcaatattttcccaatcttcatccgttaatttatattcttctacttcagtttctccaaagatagttttcaagatgatttttttaaattcttcaatttctaaagggtcatttaaaaattcttgaatgtttgctactcgtttacgaacagatttaataccttttgatttaatcttagctggattaacttttagtgcattctgaacttcgtctaaatcactatttaacatcaacgtaccatgactaaacattctatttttaactttaaccatggcattccctgagattttcgcttgtccaacttgaatatcgttacgaccagttaattcagcattgacgcctaaagattgtaatgcttgaacaattggttcagtgaatttttggaaattgtggaaactgttaccatcatcatctgttatgaaactaaagtttaaattgccagtatcatgataaacagcgccaccaccagaaattcttcttactacatcgatgttatgagcatctatatatgtctgatttacttcctctatcgtattttgattctttccaacaatgatagatggtctatttatgtaaaataaaaagtaactttcttctgctggtaaattttttaaaacatattcttccattgctaagtttaaagttggatctgtaatattattattactaatgaatttcattacaatctctcccttatatctatatatattctctacttatttatgccttaactttgctcaaaatgccaattatatactcacaaatcattctaaatatcggcttaaagttacattttattatttttgattgttaatagtttatttgttaagtgaattttagtacaatataatttagttatgatttaaggaggacttaaaatgactgttgcagaagtgggtaacattgttgagtttatggatggattaagaggtcgtgttgaaaaaatcaacgataactctgttattgttgacttaacaattatggaaaattttaatgaccttgatttaccggaaaaaactgttatcaatcataaacgatataagattgttgaataagaaggtaagttataatgaataaaatctcgaaggctttaacttggtttattataagtttcattatatttcatctcatattatttattatgtggggcgaacaccaagaatactggtatttatatacaggtataatgctaattgctggtatcagttatgtattttatcaaagagatattgaatctaagcggttgcttacatcaattggtgttggtattattacagcaattattttaattatgcttcaacttttattctcacttataacttctaatttaagttatagttcattaattaaagaattagcaagaacaggtgtcaattggaagtggcaaatgttagtaactttactttttgtcattccatgtcacgagttatatatgagaactgttttacaaaaagaattaacacatttttcaataccgaaatgggtagctatattaataactgcaatttgttctagttcattatttatttatttagataattggtggatagtaacatttatatttgttgcacaagtgatattatcattaagttatgagtatactcgacgtatagcaacaacatccgttgcacaaattgtagctattatattgttattaatttttaatgcttaaataagcttttcttagacgtatgtgttctaagaaaagcttttttgcttaagaatagcaatacgaagattcgaggcatgcttcattatagtggtaatattttataaaaatagtataataatttgtgggcaagttgaattgatggtggctatctgagtaaaggggggtggtgcctatggcattacttaacacttttgaaaggaaaagcctattgtgatatctattgcaaacgcattacatttaatgttaagtttcggtatgtttatcgtcactttcattggtatagtagtagcaataataaatttaagcaataaaaaataaccatcatttcaaaactttgacatagaatgatggttaaagaaaatctcatttagtcaccgtctttttaacgggctcattaggcgacatgttcctgcatgtcgtctttttacatttttatagtaacatatcttttatttaattgtctatttttattagatgtgtaacaaaattttgaagtattttccgtatattgcctgctaaacatgtcagatttgaaaggaaaatcatactgtggtagaaatcaattatgattatatggtagtacttataaataagtgatttctattgaatatgtaatgaagttcatatattaatataactttcattgatatagaagtcgcaatgattaatttaaacaataaaaaacaaccatcatttcaaaactttgacaacgaatgatggttaaagaaaatctcatttagtcaccgtctttttaacgggttcaataggggacatgttcctgcatgtcgtctatttatgcactgcgcaatttaacaataatacaattatactttgatgtccatttaacataaagtggttgaaatttgtagcaaataaattaaccttgaatattttcagaaaattctgtataaataacgaaaaagagatatggattaaatatgaagaggtgtttttatagaagaataaaatttttggcactatattatatttaactttagcacttggattatcaacagcagcttatgcatctacagaatacgcagaaggaggcacttggagtcacggtgtcggcagtaagtatgtttggtcttattattatcatggtcataaaggacatggtgcaacagctattggaaaatatagatcatttagtggttatacaagagctggtgtaaaagcaaaagcatcagctactaaacataattgctgggtcaatagagcgtattataacatttattaaatactaaaaaatcatagaaaataaacaacgcaagaggtacaacatgaaatggttcaaattaatacttgatgttacaaccttcattctgattgctatattgttatttgtttatacatataaagaaaacgaagaaatattgcctgatactaaataccctatagcggtaactgactggaataaaaaatatagtaaaaatgagatttataaacgtataaatcaattcgctaaaaatgagaacgtagcaatctataaatcaacttcaaattatacaaacaaaaacgtagataaagatatatatgtatttaataaatcaaaagcaacaactatcactccttttaacgctaaatataacattcattatttaagtgacgacgaattattaaaaaagatatcaaaggaagttattttgtaaaagacaaaaattttgacgtgtctaaattcataaattttttaaaagaatatggtgttactgctgaatcatacaaaatagatcatatgatgattgccgttggtgtcattaaacaaatgaatatagaagttccgttatccgcacttttaatcgtttattttatttattatattttcgaaaagaacattaatttcaaagcgtatgcgattaagtatttaaatggttttacattaagaaaaataatttttgaaaatttttcaaaaaaatgcacgtattgggtaacgttaatcataagtcaaattcttttaactacaagtgtactttggatattaaattacacgggtaatttagatttattcatattaagattagttctgctttcatgtcttttcattttaacgattagtgttattaatttatggactttcttaatgttactaaatttaaatattgctaatatgattaaaggtaagcagcactttaaaacaattcgttttattaatacagtttgtaaaagtattctcttagtactaatagctaatgtaatgatagaaaatactagtgttattaaagatttgaataaaataaaagaaactgagaaatattggaatgtattagatgattattacacgattgaatttgcaccttatcacgaaacaaaacaaagtttgattgataatatggtgcgatcagaacaattagtaaaggctagtgaagcagaaaataatgcgattttattcaaaccaaagggtgactccgttgacaatgacaacttttcacctgatgaggggaatgtaatattagtaaataatcagttttggtcgatttatcacaagcagtttcaacctgatattccaataaaaaatcaaaaaaataatgtcgaagtaattattccacaaaagtttcatgcaatgcgtaatgaaatcaatcaagcatatcattcatggtttgaatttgtacaaaataaaaataataaagagagtaagttatctatacagtttatcaacaaaaatgattatcgaatttttacatttgatgcacgagatagtcgccatttgtcatttatagaggcgccaatcattgtgaatgttcaggcatcagatttatcgaatgatttttattatgccatgatcagtcaaggcgggtatttattcaaaaattatgacgcgctagtaaaaaatattgaaaagtatcatcttgatggggaaatcagtggaataaccaattataaagatagcgtgatggaaatgtatcatgaaaacaatttgaaattaacagtactcaacttttcacaaatcattatcgcaatcattttaataattattattttatttgatgtgaaatattattttgaacaacatcgaaaattactcgtaatcaaaaagctatttggttattcaacattaagagccaattaccaatacttattaataaataatatagttgttgtttttattggaatattgacgaatgtaattttacattctcagtatataatgatgatatttgcaacgattattgttgttcaaatattattgcagatttgcagcctatactatcatggccgacgttttaatgaagttatcaaggagttttaactatgaaatatatcattgcaatattattaggattaatcgtatccattactattgcttttacaatcatacatcatcctatacttgatcgttttaatcctttcttaaaaacggagtatagttatgccaaagtgccaaaaggtacgcaacaatatgttaatattacggcttatagtgaaagaggggaaaagcttgattataaattaacatttaatggattttcacctagtagaacgtatgtcgaaataaagcataaagggcaatatgtcatatcgatcacatatgttgaaaaagaggatacaccaaaagaggtaagacaagaatgatagaattaaaagatttaaccatacaaaaaggtaatacacatattttgaagaaacttaatttgaaatttcaatgtggaaaatcatatgcacttattggtaaaagtggatgcggtaaatctacattattaaatactattgctggacttgaaaaaacggggaaacaatatgtctattttaatggtcaattagaacaatttaaatctaatttttacagagataaattaggatatttatttcaaaattatggattaatcgataatttgacagtaaatgaaaatttagatattggattagcatataaaaaaataagtaagaaagaaaaagaacaattaaagatacgttatatagaacagtttggtctgtcaaacagtttaaaaagaaaagttcatacgctaagtggaggtgaacaacaacgtgtcgctttaattagaatgatgttaaaagatccgattgttatgttagctgatgaaccaacgggtgcgttagatcctaaaacaggacagatgattattcaatcattatttgatttggtcgatgaaaataaagtgctgattttagcaacacatgatatggctattgcaaatcaatgtgacgaaataatagatttagaacagtatagaaaagtagcatctatgtgatatccaaaagataaaattaaaagccaatcaatgggaaatgttgacttcaacactccgtttgattggcttttataatgtgttactaagttatgaaagtaacaacggcaaactgaaaaaaagcaatataataatatttaatacgattagtaataaatgtaattgatttttcgttttaatatagcaaaaaacaatgactaaagataacaacaatatcatgattgcacctgggaagaaccataatgctgaagctgtgtaccaaatcattggtaacgccataataataaaagatataagacaagaaaggataccaataatattataagttctagtcaaaattacacctccaattttcattttaaaatgacatgcgtaaaacaatcattttaaatacatcatacaataaaattaaattgtgcggtagaagaatttgaaattaaattgaattggcttatctttcgtaaacataattatgacgtaacaatccttataagtggaacgagtgtagttataccatctgtatagagagtcgtatcaatcataaaatttaatctatgttgttattgattttcatactacaaataccgttttaacattgtgtaaaatattattttacttaaataaacgaaataaaatattttaattattgtatatatagttgctctaaatggttgcggagtataaaatatattttgttaaatattttattaagaggtgcgctatggaaaaggggattttcaattacgataatgcgaatgtattaaaattagatactaatcagttaaatgaaaacataaaagtcattgacgatatatttaaaaattatgagcagatagatccaactatagaaatcgaaaatggaaatacaaaattaaaattaaatggatattttattgcgtcaattataagcccattaaatttaaataaacttaataatttatatgttgaagaagaattttatcatacatataacgaattaattgttaaatatactgaggtaaaggaataattataatgaaaaaaatatttatgatggtacatgagttagatgtcaataaaggtggtatgacctcttcgatgttcaatagaagtaaagagttttatgatgcggacatacctgctgatattgttactttcgattacaaaggaaactatgatgaaattattaaagctttgaaaaaacaaggtaaaatggatcgaagaacgaaaatgtataatgtatttgaatattttaaacaaatttcaaataataaacattttaagtctaataaattgttatataaacatatttcagaaagactaaaaaatacgattgaaattgaagagagtaaaggtatttcaagatattttgatataacgactggtacatatattgcctacattagaaaaagtaaatctgaaaaagtgattgatttctttaaagataataaacgaattgaacggtttagttttatagataataaagtgcatatgaaggaaacatttaatgtagataataaagtttgttatcaagtattttatgatgaaaagggatacccatatatttcaaggaatattaatgctaataatggtgctgtaggtaaaacttatgtgttagttaataaaaaagaatttaaaaacaatttagcactgtgtgtttactatttagaaaaactaataaaagattctaaagatagtattatgatttgtgatggaccagggagttttccaaaaatgtttaatacaaatcataaaaatgctcagaaatatggcgttattcatgttaatcatcatgaaaatttcgatgatacgggtgcatttaaaaaaagtgagaaatatattattgagaatgcgaataaaattaacggtgtaattgtattaacagaggcacaaagattagatattcttaatcaatttgatgtagaaaatattttcactattagcaattttgttaagatacataatgctccaaaacattttcaaactgaaaaaatcgtaggtcatatttctagaatggtaccaacgaagcgaattgatttgcttattgaagtggctgagttagtcgtaaaaaaagataattctgttaaatttcatatatatggagaaggatctgtcaaagataaaatagctaaaatgattgaagataaaaatttagaaagaaatgtttttcttaaaggatatacaacaactccacaaaaatgcttggaagattttaaattagtcgtttctacatctcaatatgaaggtcaagggttaagtatgatagaagcaatgatttctaaaaggcctgttgttgcctttgacatcaaatacggaccaagtgattttatagaagataataaaaatggttatttaatagaaaaccataatattaaggacatggctgataaaatacttcagcttgttaataatgatgtattagcagcggagtttggttcgaaagcgagagaaaacattatagaaaaatattcaacggaatcaatattagaaaaatggttaaatcttttcaatagctaaatgaaaaaatcctaggtattcatgagtacctaggatttttacgcatgatatatacaaaaaaagagaggatagtcctctcaaataatagttaataaaattgtagccatttcttccagctgtaactactaatacaagctaagttcattacgatatgtatgatttcaaattcataaccacttacatatcctcttgtaagtttaagtgtgaagattgagcctaacataacacaaatataaaaaacattaacataaggcgttaaaaagccgataataagtgctaaacctccaacaacttcaccaattgacatcaatactgcgatggtaggtggtaaacctaaagagcctaagaagtgaattgttccatctaaatcaacaaatttcaaagtaccatgcactaagaatgatgttgctaacatccatctaattaaaagcatacctaatttcatcatgtcacctccaacatacgtatttttaaaacatagtccaaattatatttgtaaagatgtggaaagtaaagattatttataaaaataattattaaatatttattaaatgttctattgtattgaacaattgttgtagaaagacgtttaagtcatcagttacattttgtatttataaataaagattagcacagcatagtacaaagtttagaggtaaatgaattaattattgcatcgctatttatgaatcgtaaacactattatgaaattgcaagagtagtatggctaattagtatgatggtttgagataaatgcgtgttattaaccagtgagtcatcttcaaaattagaggccatttgctgtttataataagatgatttgataatcaactatgataagaaaaaataataacctcttaaatatatcataaacaaattaaatgataaaataataatatagttttctactaaagttgtttggaggtatatgtgtgaataggaatatcgttaaactagttgtgtttatgctaatcttagttgtagcagtagcgggttgtggtcaaaaagatactgaagagaaaactgaaatgacgacaataaaagatgaattaggaactgaaaaaattaagaaaaatcctaaacgtgttgttgtattagaatatagttttgctgattatttagcagcattagatatgaaacctgttggtattgcagatgatggcagcagtaaaaatataacaaagtcagtaagagataagattggggcatatgaatcggttggatctagaccgcaaccgaatatggaagtgataagtaaattaaaaccggatttgatcattgcagatgttagcagacataagaaaatcaaatcagaattgagcaaaattgcgccgacaattatgttagtcagtggtacgggagattacaatgcaaatattgaagcatttaaaacagtcgctaaagcagttggcaaagagaaagaaggcgagaagcgtctggaaaagcatgataaaatattagcggagattagaaagaaaattgaacagagtacgttaaaatctgcatttgcattcggtatctcaagagcaggtatgtttattaataatgaagatacatttatgggacaattcttacttaaaatgggtattcaacctgaagtcacaaaagacaaaactacgcatgttggtgaacgcaagggtggtccttatatatatttaaataatgaagaacttgccaatatcaatccaaaagttatgattttagccactgacgggaaaacggacaaaaatagaacgaaattcattgatcctgcagtttggaaatcattaaaagctgtgaaagataacaaagtttatgacgttgaccgaaataagtggttgaaatcaagggggattatcgcaagtgaaagtatggcagaagatttagaaaaaattgcagaaaaagcaaaataaaaatacagcgctactcgtaaatcatataagagtggcgctgtatttttaattatgtttattatctgtcggatgtgatgatttacctgaaagtttatttcgaataaatttaattacataaccgacaaggattgttttaacaattcttttaatgaattggcgcatcgttacatacctcatttctctatatcttatgaactatatacccattcatatatgctttttaaacgtcattgtcactatttaatttttagggaatataatataaccatctttatctgcttttttagtaaaaatgacaaaaatggcatgtattattgagatgatggtagggatacctgtccagaaaaataataagtgaaaaagaccttgtccaaatttatcagcataaaatttatgaatacctaaacctccaagaaataatgcaacaataacataaatggctttattgactttcatttgtaaatcctccttaactataattctacttaaattcgttgtgaaaaccaatatttttaactttagaattttcaaactttctaaaattataagtatatctttttaaaataagctagaatttctatataataaatgttaataacgtaaaagggaatgatgacatagtgatacgtcaagcacgtccagaggaccgatttgatattgcgaagttagtttatatggtgtgggatgatatggaattagaattggtaaagcatctacctaaagacatggtattagatgcaattgaaaaaagctgtgttgatgcaacatatcgaactttttatcagcatattttagtttatgaagtagaaagtaaagtagcaggttgtattattagctatagcggtgaaaatgaattgaaatatgaaaaagcatgggaactacttgacttgccagaagaaataaaacaatatggcacgccattacctgtaaaagaagctaaagacgatgagtattatatagaaacaattgcgacatttgaagcatatagaggtagaggcatcgcgacaaagttattaacgtcattacttgaatcaagtacacatgttaaatggagtttgaattgcgatattaataatgaagcagcattaaagttatataaaaaagtaggctttatatctgatggacagattgaattatacaagcacatgtatcatcatttaattgttaaataaaaaactcgacagttcgatgtaagtcgattgccgagtagtatcattttatattaaatgcctgcaaataatgcactaatataaatacctaatgcatataataaaccgaaaaatgtatttgttttaccagcagcagccattgctggcatcattgtaggcggtgtatcattcttcttgaaacgtctgataactttaacaggcattgggaatgataacaacgcaagtaagtaaaataatgagccaccaggtttaataatgatcgtaagtacaataaaggcataagcgataaagtacatgattgccataaatgttaaagaagcatttttacctaatagaatgggtaaagttttgcgaccacttgctttatctttgacacggtcgcgaatattgttagccatattaattaaaccgatagtgattactataggtacacttaaccaaattacataactttgaatattgccagtttgaataaagaatgcaataacgataataaacatacccataaatacgcctgagaataattcaccgaaaggcgtccatgaaatagggaaaggaccacctgtatataggtaaccaacagccatacatactaatccaactggtaataaccaaaatgaagagttagcagctaaaaacaaacctaatattgctgctaagatgtaaaatgcaatggctaatcgtagcacaagctctgggctcataccgttgcgaacaatggcaccaccaatgcctacagattcatgatcatcaaggccttttttataatcatagtattcattaaacatattagttgctgcttgaataagtaagcatgctagtaacatggcaatgaataggctgattttaatatgatcttcgctaccaagaaaatatattttagatgctgctgtaccaactaaaacgggtactacggaagcagttaatgtatgaggacgcattaaatgccaatatttcttaactgtagaatattgctgatattgattactcattgaatacaaaacctctttaaatcatattttttataacaaagatattttaatagaaagtagcataaaggtcaattgacgtgaaaaattgcaagataagtttaagcaattcttgtaacacaattatccaaaaatgatacaatataataatgagtgaaaaaagacgaagaaagaagtgaaatggatggctacgggcgtattagaggacgatattgtcaaagagatatatggcagctcaaaggaatgggtttcagttgaagtgaaattatcacagtcactagacccgagcacattatttcatctcactgacaatgaggcaggagatcgcttttatatgcgtttgaatgataatcgaacgtcatattttggctacaaagcaattcaattattcaaaaataattctaaaaataaacaatctatttttaaagactgggaaaaattaaaacataacatcacatttatacatccgcaatctgagaaacatcatcttcgagttgttggaggattccaattttcgagtcataaatcagatgatgaatggcgagagtttggactaaatcattttgtattacctgaagttttaatttcaactgataataatgggacatttttaacttatacagttaaaagggaaagttttactgttgaggcattgaacgatttaatggatttgttcaacaatatatcggacatagatgtggacgagcaaattggggaaattactagaaatgaagatatttataaagatgactggcgtcaacttgtagtagaagctatagaatctattaataatgaagaaaaaattgtactagcacgtagacggttaataaagttcgataaagatatcagtattccatatattctaaagcaagcatattctaaagaaaaaaacagttatatattcttgttagaatcacaagattctatattcttttcacaaacacctgaacaattaataaaggtcaataataaaatactatcgactaaagctgtagcaggtacaattaaacgttcacaagatgaggacgaagatacaaaaaatgttgaagcatttttaaaagataataaaaacttaatcgaacatcgatttgttgttgacagtattttacatgatattaaaccttatatcactgaattacattatgataagacgcctaaaattctaaaaaatgatcatttatatcacttgtacactgaaataaaggcgccactgaaggatgattcgtatattagtttaattgataatttacatccaacacctgctttaggtggctatccaaaagaatttgcgatggattttattgaacagaaagaatttggtacacgaggattatatggtgcgccggttggctatatagatatatatgatgattgtgaatttattgttgcaattcgttcgatgcttattaagaaagcacaagcaactttatttgctgggtgtggcattgttaaagattctgatccagatagtgaattggcagaaacgaaccttaagttcacacctatgatgaatgcattaggagtcgatatgaatgggaaatcataaagcagctttaacgaagcaagtttttacatttgcatctgagttatatgcgtacggcgtaagggaagtagttatcagtccgggatcacgctcaacgccacttgcacttgcatttgaagcacatccaaatattaaaacatggatacaccccgatgagcgaagtgcagcattttttgcagttgggttaattaaaggtagtgaaagacctgtcgctatattatgtacgtcaggtacagcagcagcgaattatacgcctgcaattgctgaaagccaaattagtagaattccattaatcgttttaacaagtgaccgtccgcatgaattaagaagtgtaggcgcaccacaagcgattaatcaagtaaatatgtttaataattatgtaagttatgagttcgatatgcctattgcggatgatagtaaagagaccattaatgcaatttattatcaaatgcaaattgctagtcaatatttatatggaccacataaagggccaattcattttaacttgccatttagagatccgttaacacctgatttgaatgcaacagaattgttaacttctgagatgaagattttaccgcactatcaaaaaagtatagatgcatcggcattaagacacattttaaataagaaaaaaggtttaattattgtaggggatatgcagcaccaagaagttgatcaaatactaacgtattcaacgatatatgatttgcctattttagctgatcctttaagtcatttaagaaaatttgatcatccgaatgttatctgtacatatgatttgctgtttagaagcggcttagacttaaatgtggatttcgtaattcgtgttgggaaaccagtgatttctaaaaagttgaatcaatggttaaagaaaactgatgcatttcaaatattagtgcaaaacaatgataagattgatgtctttccgatagcaccagatatttcatatgagatttctgcgaatgatttctttaggtcattaatggaagacacgaccatcaatcgcgtaagttggttagaaaaatggcaacgcttagagaaaaaagggcgtaaagaaattaaatgttatttggaacaagctacagatgagagtgcattcgttggtgaattgattaagaaaacatctgaaaaagatgcattatttattagtaatagtatgcctatcagagatgtagataacttgttattgaataaaaatatagatgtctatgcgaatcgtggtgcgaatggtattgatggtatcgtttcaactgcactgggtatggctgtgcataaacgaataacattattgataggtgatttatcattttatcatgatatgaatggactattaatgtcaaaattaaataatattcagatgaatattgtattattgaacaacgatggtggcggtattttttcatatttaccacaaaaagaaagtgcaactgactattttgaacggttgtttggcacaccgacgggattggatttcgagtatacagctaagttatatcaattcgattttaaacgttttaacagtgtttcagaatttaaaaatgccacattgttatctgaaacttcgacgatttatgaattgataacgaatcgcgaagataactttaaacagcatcaaattttatatcagaaattgagtgaaatgattcatggcacattataattactatgaagcaaacgttgagaccaatcaagttttagtattactgcatggttttcttagcgacagtcgtacttattataatcacatcgataaatatactgatatctgtcatgtcatcactatagacttaccaggacatggcgaagatcagtcttcaatggatgaaacgtggaattttgattatattacgacgttgttagaccgaattttagataaatataaagataaatcaataacattgtttggatattcaatgggtggacgtgttgcattatattatgcaattaatggtcacatccctatatctaatttgatattagaaagtacgtcaccaggtattaaagaagaagcaaatcaattggaacgccgtcttgttgatgatgcacgtgctaaagtattagacatagcaggtattgaattatttgttaatgattgggaaaagttgccattatttcaatcgcaactagaattaccagttgaaatacaacatcaaataagacaacaacgattgtcccaatcgccacataaaatggccaaagcattaagagattatggtacaggtcaaatgccaaacttatggccgcgcctgaaagaaattaaagtaccaacattaatattagctggagaatatgatgaaaaatttgtacagattgcgaaaaaaatggcaaatttaattcctaatagtaaatgtaaattaatttctgctacaggtcatacaattcatgtggaagatagtgatgaatttgatacaatgatattaggatttttaaaggaggagcaaaatgactaacagacaatgggaaacacttagagaatatgatgaaatcaaatatgaattttatgaagggattgctaaggtaacaataaatcgccctgaagtacgcaatgcgtttacacctaaaacagtttctgaaatgattgacgcattttcacgtgcacgtgatgatcaaaacgtttcagttatcgtattaactggtgaaggtgatttagcattctgttctggtggtgaccagaagaaacgtggacatggtggttatgtaggtgaagaccaaatccctcgcttaaatgtattagatttacagcgtttaattcgtattattccaaaaccggttatcgcgatggtaaaaggttatgctgtaggtggcggtaatgtactaaatgttgtttgtgacttaacgattgctgctgataatgctatttttggacaaactggtcctaaagtaggttcatttgatgcgggttatggttcaggatatttagcacgtatcgttggacataagaaagcacgtgaaatttggtacttatgtcgtcaatacaatgcacaagaagctttagatatgggtctagtaaatacagtggtacctttagagaaagttgaagatgaaactgtgcaatggtgtaaagagattatgaaacactcaccaacagcgttacgattccttaaagcagctatgaatgctgacacagatggtttagctggtttacaacaaatggctggggatgcaacactgctttattacacaactgatgaagcgaaagaaggccgtgatgcgtttaaagaaaaacgtgatcctgacttcgatcaattccctaaattcccataagttattttgaatatgatattaagtcacttgcgtcgtttattagcgacgataggtggcttttttattttataagaatttaaaaggggcttttaattaattatcataaatataagatagtttgagaaaattaatagagaaaaaataaatgttaaagattattattacaatcaaaaaacgagctggtgagaaattgaattctcgccaacccgctttatgaagtgaaatcatttaaattagttatactaagcgctcataaacgattgggcgcgaagtgccaataccttgtttggatgacgtttgcatgaggatatgctgtgtatcatcataatcaagaatataaatgatttcttcattatcaatagatgaaaatttaatgcgttgatgtgccgtatctataaaaagaatatgatattgattgtgacttgtatcatcgccatgacgtatacaaattgatttttgtaattgatgattactccaattaccaatgaataaattgatattggtttgttctagatgtgtgagtttggttgtgtcgtaaactaaatttataaattgtagttgatacatagttttacctgcctttaatcaatatctatattactttttagtaacctatcattgaaccataccagttataatcacgattgaatgataaatgtaataggcttgaatctgcatcttggattgataattctgtatcccaaggattccagtaaataagtttttcttggtcattaattttagcattaccaacaactgctagggcatgtcctaaatgtggatcattagggttttgagatacactttgtgcaagaatcataattcctacattatcttttgtaagttgatcaacttgttcatatgatggtacgccttcttgataatgaatatctctgccttgtgatttaccgtattcaatcatttgattagggaatgttgagcaattaggaaggtcttgctcacttacttcagggtataatgtacgcataatatcatgtgcattataagtgtctgtatttttagttgcatttaataatgctgccatactaaatcctgcacaccatgagttatcgaattgttgttctctaattttgaagttttttaatgtattttcatattgaacttgatcttcttgtatcgcttcgttttcttcaactttagtaggtgttactgtattttttaactcttgtttcaattttgatgaaactgttttagcactttctttttcttttacattaccaggtagtggcgtagcttttactaatctaactttgccatcttcttcaaaataaaatcctttttcatcagtaagaacagtgatatttgaatttttatctttaatttggtctaaatctttagcgatgaagtttgaaattttaacactgtaattcatgtcttcttttgatttgtttaaatcatctttatttttagggctaagtgttaaagtataaacaattttaccgtcttttataactggataatagtaactattatcttcttcaccattaaatttataaattttaaaagcttcgccaagttcatatttaccagtttttgcattactttgtttatctaatgctttagcataaccagcaaattgttgttgtgctagatcttttactttttgaggtactttgtcactcttaacattaatttctagctgtttagagtgtgaatcggctttggctttattgttattagcaaatgcgcctagtgataaaataagcattgaaaccattatgatgcttataatattgaatactctagatttatatgaactattcatataataccctccatttaaatcaaaatattttgcgttgctaagactttgcttctatttactaaatctaaattaagatgaagtttatgcagcgtcagggttgtctgaattattgttatcgccattgtctggattatcagggttgttagggttgttagggttatcaggattgttagggttatcaggattgttagggttatcaggattatctgggttattaggttggtcatcgttggcaaaatggatatcttcaatattttgttttaagaagttgcgtacattttcattaataaataccgcaccattaaattcatttggtacaccgccccaatgaattccgatcacttcatttttttcattaaatacaggtgaacctgagttaccaccagttgtacttaaatcatattgcatagcttcgcctttgaggtaagtgatttttcctttactttcccacattgttgctacaggtttatcaccaggatatcctgttacagtaatattttggttaacttgtgtttcagcattattactcattgttgctggtttaactacttcaccaatatgtttgttttgctcattaggggagaatttaactattgctaaatcaccttcgcctgaatatttagtgatttgttcagcagtgaaaccaccatttggataattgtcttggttaattgcagaagggaatgcttttaaagcatgaggatcaccgtgcgtagcatctacgacgtgtttatttgttaaaagagtatctttacctacaactacaccggaagcaataaatgtaccagtaggtgcttcaacttgaatataagttacgggtgcataatgaccattcgttgtatctgtgatttggtgacgatcgttatttggtaatataacatttgcgtgttcacgttgttctaatggtttaaggttaccgcctttttgaatcttaggtgtttgctgtttgcttgactgtgattgttgcggatgattgtccatagcctttgaagataacgcgtttgctgctggagaactcacaagtgtcgctgttgtcaaagttgcaacgaataaagaactaacttttaaaaatttacctttcatctaaaaacctccaaaaaatttatttacaagttaaatataacactaaaaatttttaagtcaataagaatatataaataaattaaaaagtttttgtaaagattagagtttacaaaaacattaaggggattaaaattgaattgtattatactttattcaattgagttaaattgataagatcgtcaattgtttgcatttatctaaaagaataaataagaaaggaattgagagcgaatggaaagtatttgtttataataataaatagtaacttttgaataataattgtttggccaaaggtagattaatatgaatggtgatatattatttgagtgcttaagtttcgaagaacaattataagttagcatattaaaaccttttgatagaatcattttgagtgaggtgtttaaaggagaggaatataactcggtagtatttacagtctctatagagtattatttaaaacttatagaatataaaaaactgaacgtactatgaatttagttcacgacgtccagttcaacatatcatttttatttagtatttaaatatttagcaagtctcttcataccttcttttaaaacatccatttcataagcataggaaatccttacaaatcctttaccgaattctgtaaaggatgagcctggaacgattgctaaatgtgttgattcaagtaaatcgacacaaaattcgaaatcgtcatcggtgatatgtttaatacttgggaaaatataaaacgcgccttcaggttgagcggtaatctcaaaacctaatttagttaattcagatactaaataatttcttcgttctacataagcttcgttcatatatttaggagcttctaatccttcgttaagtgctgttatacatgctatttgagctggaacattggcacaaatacaattataggcgtgcataaatgttaatttatcaatcaaatattgaggtcctaatagaaaaccaattcttattccggttgctgagtgtgatttacttaaaccaccaattaatattaattgatcacgaatgtcttcaaattcagcgaaggatacatgtttaccactaaatgtattttcagcataaatctcatcgctaataataaatatcggatatttttttaatacatttacgatatttaaaacttcatttctttttaaaactacgccagttggattagtcggataatttaacaagacagcttttgtctttggagaaatatgactttctaatgcatcaggtgtaattttaaattgtgttgctgttgtatcaatataaattggtttaccacctagtacttcgatgagtggtatgtagcctgcataaattggtcccggtattataatttcatctccaggctctatgatagaacgtaacgttgtgtctattgcttcacttgctccatttgtcacaataatttcttcaggatcataggaaaaatgataacgatttttgaagtattgactaattgcttcgcgagtttctaataaccctttattgtgagagtatgatgtcttgtcattgttaatagcatcaatatatgcctttttcacaacatcaggcatcgggaagtctggttggccaatagttaaattaacacaatcatccaaattattcatacgatttgaaaattggcgaatacttggtgctcttaaatatttagaattagaatttaaagaaagtttcatttgtgacacctcaaatataaatcaaatattgtctaaaaatttagaaattaataatatcataacatacttttaaagcaaaaaagggtaaattacttaagctttatttgaaaaacgaaaaatgtctaaatacactgtagtaactacttttcaaaatgaataaagtggttacagttaatgtacttagacagtataaaattatgaatctttaaactgtgatggtctttgtaaattaattattggatttgtccatttacaaacaaagtttgtagataatacatatacgatgattacagatatacttattaaataaagataagtcattaatgatataggattatcgaatgggtaccattcaaatcctctaacaatgccaataattaaaccatgtaataaatatacgtatagcgtacgactaccaatataagtatataattttttctttgttgacattaaatttagaaacgcagtcattgcgattaatataattccatataatataagtcgtttaaaaggactgaatatactctgtccttcattttcaagtgaagtatatggtgaacttcccaataaccaatctgcattgataggatgaatcacgtaaacgataaaaaacaaaataaaggtaatgatagatactggtattagttttttatttttaaaaatagccgtatgttttttggtgaaaatgtaacctagataaaatattgggaaaaatacgattgtccttgaaatgcttaagtagctatcgatgttatctgaaaaacctgctccaatagatataataattgaaactgatagcactttatatggattaaatcttctaactattactaaaatgacatgaaagaaaaatagcgtgatcaaaaaccataacgcaaatactgggttaaaaggatcaagttgtaattcgtcacttttacctgttaagaaataataaattgaaaagaatgcaaaaaatatcatataaggtactatcaaacgttttgaaattttttctaaatagtatggtttatcaatatttttcgcgaaataaccagatataaacaaaaatgttggcatatggaaactataaataactaggtataatgctgataaatatttatcgccactagtgtagggttgtaacatatgtccaaatacgactaataatattaaaattgctcttgcgttgtcaaaaaaataatctctctcttttaatgaagtcatattttatctcctttatgtccataagactcttactaatttattatattttgtattagttatgcaacaaatttgtctattgtgtcgaatagtattgtaaaaattataaaaaaagcatataatattataaataatatgtagtggagtagaacaacatgtataaacaacttgaaaaacttattacactgactaacaatgacttaaacttagtgaatagaagatttggacaacgcacggatatcacatctgaacagctagaacttctccgtattttatttaattacgatcgcttatcacagtatgatttgacgatgaagattagcagggaacaatctatagtttcaaggtggattaagaaattagttttgaaagggtacatcacaagtcaacaatctagcgaagatttaagatgtaaagaattaattttgactgatcaagcacgtacattaatttcacaaataaataatgcacgttgcgaattgattgaagcaagatgtcaatgtttatcggaagtcgaattagacaatttaaatcaattacttgataagttaaatcaacgacgcatatcgttgtaacacgacaatagcaaacacataatttagtgtcgttgtgcacacaacaaaaattgaatcatgaattacaagcaaaagtagcggtgattgttaaaattgatggtaaacaatcaccgctatttttgcttgtgtatgtataaaaaagggatcaaaggtcatcccccatgattgatagtgggggatgacttttgatcctatgttcatgttgcttatttatattgtgggatgtcgaagtatttgccgacttcgccaattttatcatagtagcctttgatgattttagcattgatgttagcccaatctatatctgtagcatattggtgtgttcctggatgtgcaggattccatctcattttgtaaagtgtattttgaccagcttttacatatgagttgccgatgaatttagcaccaccaacgattgcttttgatactgtgtcccaaccagcttgtttagcatatttaataccttcacgtaaaggatcgttatcatatgcagcaataccaaatacgttatggtatttcgtgtttgagttagttacaactttgttgttcactacatctgcacctttcgctaattgagaagtaccgttacctgtttctaatagggcatgtgagataagataaacttcattaatgccatacatttgagcagctttgttaaatgcagcaccttggttttctaatacacctttaccttttaagaattgattgattttatcaatagaaatattttgtggttggtctaagcgtaagaattgatattttaatgctggatcttgagctaaacgcttcgtatccattgcatgcttaacatcattaaagttagcatctgtccacttacctggtacacgttgtacttgtggtttatattgtaaaccagcttgtatttgagcaacttggtttaatgtcatacctgtttgattatacttaattaattctttagctaaatcagttgatttaatccatgctaatttaccgttagataatttaccatagtaccaagtttgttcattaatgacttgttctttaacaactgcgaatggttgttcattaaatgcttttaatgagtatttagctgtatcagaatttggtgttacatagtaataaccattaccatttttaattacataagtgtagttataatctttggcagctgatgtagttggtttaacagcagttggtgcagttaaatcttttgcatttacccaaccagtgcggttattaatagtaccgtataaataaacatctttgcctacagatacttgtttcgttgcattaaatgtaccttgagcaatgttattgcctgttaaaatgacttggtttttagtaccccaaggaaccattgataagccgttatttgatttattaacagtatatttttgagtcgttttaacttctttgcctaagttttgaacatttaagtcttttacattgaaccaacctaatgggatgttatggcttgtattgtttaataatacatacgtttcattaccatgagcacgctcttttgttacatagaacgtacggtctgcatatttcgcaccgtttttcgctgttttttcataaacagaagcacgaataccagtgttgtttggtttaacttgagcaatcttgctaactgtttgagtcgtttgtggtttagtaacagtataagcttttacagctgtttttggttgtgctactgcttttttaggtgcagcaggtacagctaaatatgctttacttacccaaccagatttaccatttacagttccaaataaatagatagatttatcaatttgttgttgcttagtcgctttaaaagtttggttacctgtaccagaaactgcaccagcttcttgtttataagtgccccaaggtactgaatataatttagtgcctggttttactgtatatgtttgcattacatttacaggtgattttgcattgttataaataacgtcaccttgtttaacccaaccaattaaagttggactattgtaatctttaactaagtagaatttgtttccacctaaacttgcttcttttgttacagcaaatgttttttgaacttctttcgttggcttaccagttttgtcataaactgtagtgaataagccattgtttttagcattaatttgagcaacaccgtttaatgatgaaactgttaatttattatttgttgtaggtgttgatggcttaggtgttggtgtaggcgtaggtttagcagtatcaactaaatatgctttacttacccaaccagatttaccattcacagagccatataaataaattgatttatcaatttgttgttgctttgaagccttaaatgtttggtttccagagccagacacactaccagcaacttgtttagatgtaccccaaggtactgtataaagtttcgtaccaggtttgattgaatatgattgatttacatttacaggtgatttagctgtgttgtaaaccacatcgccttctttaacccaaccaaatttattaccagaattgtaatcttgaacaagatagaatttttgattacctaatgtagctgttttagatacagcaaatgttttttgaacttcattagttgctttaccagttttgtcgtatacagtagtatataaaccactatttgttggtttgatttgtgcgacaccattgtttgcagcaactgttaatttaccagttgatggtttcgacggtgtagtaggggtagttgtagattgcgtaccccatggcgccactttacccatttttattaaatatttttcattaattaagtcatataattgatcataactataattatgacttcttaaatatccatgtggatcggcatggtcagtaccacctaaatatttacttacagcgtagtgagtccatactgtaccatttccatcatactcagcactgtctggttttaaaccataatattgtaattgtgtagctgcatagtcagcatagttattcattgaacgtgcaaatgaagcatagtcgtgtgtgtgtacgatttcaacattgatgaatctagggttaccgactgcaccgacaccccaagataagtaatccgttggtgctgtttcgattatacgatccccatcaacaaatgcatgtacgaatgcgttttgatagttatttttcatataactaatttcaccatttatcgtcgaacgatcattagctgtatcatgaactacgataccttcaggacgacctacgccgttacggtatgcgtatttagggaagtaagatgtataatcttcttcaattttaggtgcttttaagttatttttacgaatgtaatcgttaattgaagagtttacttgtggtttatattttggcaaactcgtttttggtgttgcagcaactgatcttggttgtgctgaagcgctaaaagtagttactttaggtgtcgcttcagttttagctttaggtgctgatgtagttgcagctttaggtgctgcggctttatattgcgtttcaagagctgcaggtttagcagctgatttaattaattctggattaatttgattttctgaattatcatcttcatcatcaactaaactataaccagcatttgtaacattagtgttagttttaggtgctgtagtgcttgttgactttgcaacaggctgcgtattatttgtagtcgctgattgattagcacgagtgtcaccatttacttgtgcagtatcaactttttgacttacttgagcattgcctgttttgttatttgctgtttttggttggacaatagcagggtcttgatatacttgagtgccagaaatgttttgcgttggattttttacctcagcttttgcttgttcagtagttgctttaactttattactatctaaaacgtttttattagtagtttgatcttgtgtcgtctcagctgcttgaacttgatgtgcagtgactgctgaacctacaagcgttaatgcaaccattgatggtagtttgtaattgaattttttcgccattctatttattactcctaacatttattaattattactaacattatagtacctgttttatatacctgtgcgtatttaaccaatttgtaatatactcttaatttacattttcactgtaaaaaaatgaaaaaaattttgaatctcaatggtgacgtgacaaatcaaatagaattgatgtcaatttaagaattggtttattacaaatgtttctaaaatagatacaactttttttaattaagcgaggttaacttttttgtcatttcaatatgctcgatgccttcctcaagaaatatattacctctcattttaaagtttaaactttcataaaatgggatagcatgacattgggcattcatagtagctacgtaaaaaccttcatctttagctaatgattctacagcttgcataagcattctacccattccttgtccacgatgtgatttcatcacagctactcgttctattttgacagttgtttcattaatagggcgtattcgagcagtggcaactggctgtccattatcatatccaatgaggtgaatagattcagattcatattcatcaatttcactttcctcagggacgccttgttcttctacaaacactttctttcttatatagaagcaatcttctaacatcttttgattgtttacttttgaaaacataaaattcctccacatcctaacaaaatcatttacatttaatttactaataataacatagaataacgattgttattttcctcaaaaataattagacataaaaaagctataaagatgattgttgtgaatcatctttatagctaattaattattaatgttatagtgcttcttttctaataattgctgtatattgccaaaagattcgcatttgagcaatattccaattattcattcccattgtaaatcctgaaggcttaaatatattcacatcagttacttctaaagctgctgcaactaaatattgtaatggaatgctaagtgatttcattgtttcggtaatgccattttcatcatatacccatgaaaatggtaactctgattcgaaaacatcaacactattgaaaatttcaggtagggctaaaatataacatgcaccatctacaataggattgtcgatactatttttgtaataaattaggagtgcttcatagttttctcgatgctcatgattgacgtaaaaaaattcacttctaaaatgagccatatcttggctatgaatgatttgttgttctaacatattaaacatgccatttatatttgcaatcttttcgtatgtttttctactcatgtatgatgctcctttcataaatagtaaatgttaatcgtcatataatattaatttacaacaccattttggttatttgaagcttgtggcgcttgttgtgtgccaccttgattttgatttaagttttgatctgtagcaggttgttgttgattgctggaatcactgttattagttgaatcattgttctcgttagatgtcttatctttatctgtcgtatcattttgttcttttctcaataaactactatctaaaggcgttaatggtattaatgaaccataatgattaatgacacgttgatctaagaaatcatttttatcattaataggtgataattctaagtctttacgaagtaagtttgcatatttttgaatgctttcaacacttggatgataatagtaaataccatttaacatatcatctttaccttttaattgcgcagttttaatttcaacatcatttgttaagtacatttttgctaaagctttaatttcagagttagttaaattatgctttgcatttttacctacaatttgaatcacgttatcaagtttatcaatagaatcaacttcctgtgctttttggaataaaatcttaattaattccatttgacgttgtccacgttttaagtctgaatcatgatgtctagttctagcaactgctaaagcctcatcaccatttaatttttggtacccttttttaattttaatcttaccagtatcatctgtgttaggttcatttaagtcgtatggcacatcatagtatatgccaccaagctcatttacagcctcgacaaatgctttcatattgactctcacataataatcaacaggtacattcatggtagcttctaccgaatccattgcggcaattggaccaccatatgcatgtgcatgggtaatcttatcgtaatagccaactttaggaatgtagctgatagtatcacgtggaatactaagcattctaatttgatgttttgattgattaaaagtagttaaaatcatagcgtctgatctagagtgttcagcatcctgtcctttttttcttcttccatcgttatcatcgatacctaagaaaagaatagagataggttgttcttcgggattgactttattatctcttaagttggattgacgattagcatttttgctgtcttgagaagattcgaatgcatcttgggacgttttaaaaagtaacgtagcgaagactattggaacaacaatgagaaccaatgctagaaggatcaaaaagtattttaaaaatttattcatgattgatgctcctatattaaatttttgttaaatcataatcataattttaaaatataattagttgaacgatatttatacaacttcattactaatacattatagccttaaattgtagtactttatagtaaaaaatacaaatgttatgtcaaagttccttgtaatttgaatgttttgttaaaatcaaaaagcatttttaaaaatataatgcgactttagtatgatgtcttaaaaaatttaaaggcgtaatataaattcgagtgatttatacaaagtgataaggtataattaattttgttgtatagataacatattagaaaaacttattactatgtagcgtaaagcataaatgaatgataagttaatttttgtaagttgtattattaggcatctaggttcaaatttttaacgatttaaatatataaaatgaatacattgtgaggcaattatcaaatgaaatttaataaagtaaaactagttatacatgcgtgtgtactattatttatcattatttctatagcgttaatttttcatcgattacagacgaagacacattctatagacccaatacataaggaaacaaaattatcagacaatgaaaaatatttagtggatcgtaataaggaaaaggttgcgccgtctaaactaaaagaggtatataatagcaaggatcctaaatataagaaaattgacaagtatttacaaagttcattatttaacggttcagtagctatatatgaaaatggcaaattgaaaatgagtaaaggttatggatatcaagattttgaaaaaggtattaaaaacacaccgaatacgatgtttttaataggttcagctcaaaaattttcaacagggttactgttaaaacagttagaagaagaacataaaataaatatcaatgatccagtaagtaaataccttccatggtttaaaacatctaagcctatcccattgaaagatttaatgttgcatcaaagtggattatataaatataaatcctcaaaagattataaaaatttagatcaagcagttaaagcgattcaaaaacgtggtattgatcctaagaaatacaaaaagcatatgtataacgatgggaattatttagtacttgcgaaagtaattgaagaagttacaggtaaatcttatgctgagaattattatacaaaaataggagatcctttaaaacttcagcacacagcattttatgatgaacaaccttttaaaaaatatctagcaaaaggttatgcttataatagtacaggactttcattcttaagacctaatattttggaccaatactatggtgcaggtaatttatatatgacaccaacagatatgggtaaattaattactcaaatacaacaatataaattattcagtcctaaaataaccaatccattattacatgagtttggtacgaaacagtatccagatgaatatcgatatggtttctatgctaagccaacattgaatagacttaacgggggattctttggacaagtctttactgtttactataatgataagtatgtagttgtacttgcattaaatgtaaaaggaaacaatgaagttcgaatcaaacatatttataatgatattttaaaacaaaataaaccttacaatacgaagggtgttattgttcaataattaatatagaagatataacatgtatatggcattaaggcatcgaccttatctgaccagtatacgagttatatcttcttttttatagtggtaaaaagtttaaagtataaggttgaagaaggatgagtttaaaaatatgtgttaactgataaaaggggaaatcatttggtgagttggcatcagactaaaatgaatgaagacgaatacgttggtccatgcgtggtgtgaatgttttctaaatctaactggaaatgataatttaataatgtacacttttgattgtttaaacatgtacaatttttaaaaacctagggataattttattgacgtgaacaacattgagattatctttagacataaatatggattttgaagttactatatttattagttgtggttgttaatgtattaattgaattgattataatgattgtcttataagatatagaaggggacttaaccatttaaaaattgaaggaaaataaaaaccagctaacaaaagtgttagctggttaaactttacattattaaaatgttgtttataagtgtgaagagtgaccgccttgcataacccaatatgttccgacaacgaaacaaagtgtaattacaagagcaaagataactttgaatgtttgtaaacgtccatctttaccttcagttaaatgcatgaacattaataattgaagtcctgcttggacgaatgcaaagccaaagataattgtcaacttcgcgtggaatgttaatgacgtgtatagtgttacgtatactgctaaaagcgttaatacgatagatgcgataaatcctacagtatgtttcattattgtactcatccgctatacaccatccctatcatatatacggcagtaaagatgaaaacccaaacaacatctaagaagtgccagtataaacttactataaataattttggcgcattatatttgtctaatccgcgtcgttggatttggattaataaacaaatggcccaaacgatacctagcgatacgtgacaaccatgcgttcctaataggataaagaaactagaccagtaagaaccaattgttgggttaacgccttctgatgcatagtgtgcgaattcataaatttcgaatccaacaaagactaaacctaaaagtaacgtaatgatcatccaaaacatcattaacttttgtttttcttggcgcatgtagtaaatagcaataccacatgtgtaagaactgaataataatgcaaacgtcattattaaaacaagaggcaattcaaataactcagtagtcattttacctgcataatcgccaccatgttgcaaagttaatagtgtcgcaaatagggtaccgaataacgcaaattcggctgtaatgaaaatccaaaagccaagcttatttaattcgccttcatgtgtgcgtgaatcaatagtgtttgtatcatgactcatgacttacagcctccctttctttaatacgcgcttctcttaatctagcttcagtttcagcaacttcagcagcagggatatgatatccgtgatcgatttggaaactgcgataaatcatagtaccaaaaataccgaataaacaaattaatgctggaattacagtttcgaaaattaagaagaaaccgccgatagtcataaagataccaatccagaatccaacaggagtattgtttggcatatgaatgtctttgtaattatggttgtctaagtaatgacgaccatgttctttcatatcaacaaatgtgtcgtagtcattccaatctggtgtaatggcaaagttgtatttaggtggaattgctgatgcagtagtccactctagagtacgaccaaggccatcccagttatctccagttgcttcacgtggagatttgaagtgactgtatacgatactaacaacaaggaataagaatccgattgccattaataatgcaccgatagttgaaattaagtttaataagaaccaaccatctgatggcatataagtgtataaacgacgtggcataccatctaatccaagaatgaattgtggtaagaaacaaacgttaaatccgatcatgaagaaccagaagcaccatttgtttaatgtttcgtttaatttgtaacccatcatctttggataccagaagattaaaccagctaagcaggcaaatacaacaccagtaaccaatgtatagtggaagtgagctactaagaagtacgtattgtgatattgatagtcagctgatgccattgctaacattacacccgtaacaccacctaaaaggaagttagggataaatgctaatgagaatagcattggtgactcaaatgtaatacgtcctttatataatgttaataaccagttaaacaatttcacaccagttggaataccaatcagcattgttgaaattgagaagaatgagttgattaacgcaccattacccattgtgaagaaatggtgaacccaaactaagaaactaaggaacgcgataccggcagttgcccataccatactttgatgtccgaataaacgcttacgagcgaatgtcgggataatttctgagtaaataccaaatgctggaaggataacgatataaacttcagggtgcccccatacccagaagaagttagcccaaagcattggcataccgccatgtgcaactgtgaagaatgctgtgtcaaatattctatcagttgtcattaatgctaacgctactgttaaaggagggaaagcaagaataacaattaatgtagtaataaatgttgttactgtaaacattggcatttgcataaacttcatagttggtgttttacatcttaaaattgttacaaagaagttgatacctgtagctaaggtaccaagccctgaaatttgtatagctattaagtaatagttaacacccggaccaggactgaattcacctgctagtggcgcatagtttgtccaaccagctgctggtgaaccaccaataataaatgacaggttgaataaaatcatacctgcaaagaatagccagaaacttacgttgtttaatactgggaatgcaacatcacgtgctccaatttgtaatggaacaacgatattccataaaccaaagataaatggcattgccatgaagataatcatgattacaccatgtgtactaaaaatttcgttatagtggttagattctaaaaatttgttatcaggtactgttaattgcgcacgaataagtaacgcatcaataccaccacggacgaacattaatacggcacagattaaatacataataccgattttcttatggtctacagatgtgaaccattctttgtaaagatatttccataatttaaagtaagtaattactgcgattaaaccaataactaagaatggggcaccaatttgtgccattgtaatcatccagttacctttaactagtaattgatcccatggaaaattcattaatgtccacctccatgatcatcattgtcttgatcttgcgcatcttttgaaattttcttcatttctttcgcatttttcgattcatctttcttgaactcattgttatatggttcgtcatttccaagaatcatcaacttcataccatgtcgtttatagttcgcatttgtaatttgagctttacgagcaggtattaatggtttgtctgatacatctttaaacatattttcttcactagtgaagtttggatctttcaattcgaaattgaaacgtttatatgcatagaagatgtattctggatcggctgctggatcaacaaacgccatatgtgtaccattaaattctaaagctttattaggtgtgcttggtaataattgtttatcaaatgtatcttgatctaacgttttcttacctttaacttctttcacccatttgtcgtagtctttttgactaacggcatttactttaaatgtttgacgtgagaatccttcaccattgaagttagagttacgacctctgaacgtaccagtttgagatgcttctaacgtccaattcattgtcatgccagtcatggcatatttttgaccacctaattgtggaatccagaaacttgtcattgtatccatagcttgaagcttaaatacaacaggacgatctttagggattgttaatgtgttaacagtctctatatgttcatctggataagcaaagaaccatttgtatcctgcacttactgcatatacaaccattggatctttctcactcttcggtggtttttcgtaatcgtataaagttttaactgtaggaatagctaaagcagcaacgattatgataggtattacaaaccatattgtttcaatgatggcattatggtgcatcttaccagattcggcattcttattataactatacttgtaaataaaaatggcgaacatgccaagtacaacgaaacaaataacaagcatgaagacgattgaataaagaatcaagaacttctgactacttgctactggcccttttgcgttgaaaatttctatatttgaacaaccactaagtaaaattagtgtgccaaataatagaagcaaagacttaaattttgacacttttttgacctcctaatactacaaatgtagggcttaacattaattttaagttattacacaatatttacaagggcttatgggaaaaaaattaataaaattgtatcaaaaatgttgataaatcaaggtgtgacgtgggttcacacatttgttaaaattatgtgtacattttgtgactaatagcgtttttgaaaaaattgcttcatatttaaaaggaaagttgagaatagctttcaattaaaggttaattgaatgaaaataaaaaaagtttgaaattgtctaataaattgaaaatgatggctagttgattgaaaggaagcgcaaacattttaataaggaatttgccaaaagtaatttatcgttaaacaatgaaaagtggaaatttgtttgttcaaaatcaaaacatttttttaaaaagagcagttaagttttaataatttgataggtagtcctttggtatacagaaaaaatacaatatttgggttaaagttgcagatgaagttagaataacaaataaaatggtagcaaaacatgttcgtttgctaccattttatttgcagtatagtgatgagggctatttaacctcaatatacctagtggaaattttaattgcaccatctgaatcagtgacatgatatttaatttgatatttaccagatttagatgtatcaatttggccatcgactttaattttatcggttaaatctccatcttctttatcaaatgcacttatgccgtttagaaggttataatcttgacctttcttaataacgatatcattagcgcctttaatttgtggtgtagtattcgtcgttgcatctgcatttaaatttggtgttactagtgtagcagaaacaccgagggctgataatgactgtaatagtttattcataatgtaacctccgaatgataagtcatttctgagttagctttactataccttaatttatattatttacacatcatactatagtcctaatcttaccctataaagaatgaaatttaaatataaatttataaataatgaggaaataattattattttgaaaatctgccacaattgtaaaattaataatttagggataatttgaaatcaaatataactttattcgacagtttgaacttaaatttttgtgtttcaaaacaataagaaaagggaggcgaaaatgataaagaaccactaatgattaactatgtagtagtactttatcatagtcacagcttctgtgatggggcccccaccccaactcgcattgcctgtagaatttcttttcgaaattctctgtgttgggacccctccccaacttgcacattattgtaagctgacttttcgtcagcttctttgttggggcccacaccccaactcacattgcctgtagaatttcttttcgaaattctctgtgttggggcccctgactagaattgaaaacttgttacaagcttattttcattcaattaactactgtctatataaaattgttgagccaagaacaaagtgaaatgctcccttcaaagccttcatttattcaatgtctactttgaagggagcatttgatcgattaatgtcccagatttttcttgttattcatttcaattgcgaaataatattaaatgtgggttaaaagacttcattaaaactcagttattaattctcaatacataactaatgtaaatttacgaatcaatacctcgacgcattttttctgcaagcaaagtattatttaataccatagtaattgttaatggaccaacgccaccaggaactggtgtaatagctccagcaatttctttaaccgcatcataatcaacgtcaccttttaatttgccattttcatctggcgtattgccaacatcgataattactgctccttctttgaccacatcttttgttactaaaccaggcttaccaactgcactgacaatgacatcagcatcttttaaatatgatgccatatcttttgaacgagaatgtaagattgttactgatgcatttttttgaagtagtaacttagaaactggttgtccgacaatatgacttcgtccaattacaactgcatttttaccttctaaatcaatatctgcatgttttaatatttccatgatgccgagcggtgtgcaaggtacaaaagtttgttcatcgatatataatttccctatatttattggatgaaatccgtccacatctttttcaggattgattgcttctaatattttctgttcgctaacttgttttggtaatggtacttgtaccaaaataccacttacagaatcatcattatttagtctatttagttcgtttaatacttcttcttcagtagctgtttcttccaaatgtacgatttctgaaatcataccaattttttcagctgctttcttttttgatctaacataactttgactagcgccatcattaccaactaatataacggataatttaggtgtaaaacccttttcttttagcgcttcaacttgatcttgtaacccctgtctgtagtctttggcaatttgtttaccatctaaaattttagcaaccataaaaacttctcctcctattgtcaatatcctaactttgttagttcataaaactaatttacatagcaaaagacgtaaattcaaacaaaaaatcaaaataaagttcgatttttgattgaaaaagcagaaattgcttgttatgctatatctataatatacaactaaagtaattcacaattcaaacttttgaaagggtgtacaaagtgaaagtagcagtcattatgggcagttcttccgattggaaaattatgcaagagagttgtaacatgttggattattttgaaattccgtacgaaaaacaagtagtatccgcacatcgtacgccaaaaatgatggttcaatttgcttctgaagcgagagaaagaggtataaacattatcattgcaggcgctggcggtgcggcacatttaccaggtatggttgcatcattaacgacgctaccagttattggtgtgccgattgaaacaaaaagtttaaagggtatagattctttattatcaattgttcaaatgccaggaggtattccggttgcaacgactgcaattggtgcagcaggtgctaaaaacgcaggtatacttgcagcaagaatgttaagtattcaaaatccttctttagttgaaaaactaaatcagtatgaatcttcgttaattcaaaaagtggaggacatgcaaaatgagcttcaataaattaaagtttggtgcgactattggcattattggtggtggtcagcttggaaagatgatggcacaatcagctcaaaaaatgggttataaagtggttgtattggatccttctgaagattgtccatgtagatacgttgcacacgaatttatacaagccaagtatgacgatgaaaaggcactcaatcaattaggacaaaaatgtgatgtgattacttatgaatttgaaaacatttcagcccaacaattaaaactattatgtgaaaagtacaatattccgcaaggttaccaagctatacagttattacaagaccgcttaactgaaaaagaaacattaaaaagtgctggtaccaaagttgtcccgttcatttcagtaaaagaatctacagatattgacaaagcaattgaaacattaggatatccttttattgtaaaaactagatttggtggctacgatggcaaaggtcaagttttaattaacaacgaaaaagacttacaagaaggttttaaattaattgaaactagtgaatgcgtagctgaaaaatatttgaatatcaagaaagaagtatctcttactgttacaagaggaaacaacaatcaaatcacttttttcccattacaagaaaatgagcatagaaatcaaatacttttcaaaacaattgttccagcgagaatagataaaacagctgaggcgaaagagcaagttaataaaattatccaatcgattcatttcattggaacatttacagttgaattttttatagatagtaacaaccaattgtatgtgaacgagatagcaccaaggcctcacaattccggacattattcaattgaagcatgtgattattcacaatttgatactcatattttagcagttaccggacaatcattaccaaattcaattgaattattaaagccagcagtcatgatgaacttactaggtaaagatttagatttattggaaaatgaatttaatgaacatccagagtggcacttacatatttatggtaagtctgagcgtaaagatagcagaaaaatggggcatatgactgtactaacgaatgatgtaaaccaaactgaacaagatatgtacgctaaatttgaggggagtaattaaagcatgacattattatatgaaggaaaagcgaagcgcattttctcaacaaatcaagaaaatgaattaagagttgaatataaagatgaagttactgctggaaacggggctaagaaagacacaatggcaggtaaggggcgattaaataatcaaattacttctattatatttaaatatttacaagaaaatggaatagaaagtcactttattaaacaattatctgaaacagaacaattagttaagcctgtgaaaataattccattagaagtagttgttcgtaatattgctagtggatctattacaaagcgtttaggttttgaaaatggtgaagtttttagagaaccacttgtagaatttttctataaaaatgatgcgttaaatgatccgttgataacggatgaccatgttaaattgctcaatatagcatcagatgaagatattgaaatactaaaatccaaagcattaaagattaataatgtgttgaaacaattaatggatgctatgaatttaaaattagtagattttaaaatcgaatttggaaagactgagactggtcaaattttgttagcggatgaaatatctccagatacatgtcgaatttgggataaagctaccaatgcaaactttgataaagatgtatatagaaataacactggatcactgattgaaacatatcaaatatttttaaacaaattggaggatttaaaataatgaaaacaattgaactacatatcacattacaaccacaagtattagatacgcaaggacaaacgcttactcgagctgtacatgacttaggttatgcacaagtgaatgatattcgtgtaggaaaagtattatatatgacagtggatgaggttagtgatgaaaaggtacacaacattattacaactctaagtgaaaaattgtttgcaaatacagtgattgaagaatatagctataaagtgttagatgatgaaaaggagaatgcataaaatgaaatttgcggttcttgtttttccaggttcgaattgtgatagagacatgtttaatgctgctattaaaagtggtgttgaagcggaatatgtagattatagagaaacatcactaagtggatttgatggcgtacttattcctggtggattttcattcggggattacttaagatctggggcaatggctagtgtagcgccgattatttcggaagttaaacgtcttgcagctgaaggtaagccagtattaggtgtttgtaatgggtttcaaattttaactgaaataggcttattacctggtgcattattgcataacgattcacatttatttattagtagaaatgaagagttagaaatagtgaataatcaaacggcatttacaaatctttatgaacaaggtgaaaaagttatatatcctgtagctcacggtgaaggtcattattattgtactgatgaaatatatcaacaattaaaagctaacaatcaaattattctgaaatatgtgaataatccgaacggttcatatgatgatattgcaggaattgttaacaaaaaaggcaatgtatgtggcatgatgccacatcctgaaagagctttagaaacgttgttaggtactgatagtggtgtgaaattatttgaagcgatggtaaaaagttggagggaacaacatgtctaaatttatcgaaccaagcgttgaagaaattaaacttgaaaaagtatatcaagatatgggattaagtgatcaagaatatgaaaaagtttgcgatattttaggcagacaacctaactttacagaaacaggtatcttttctgttatgtggagtgaacattgctcttataaacattctaaaccgtttttaaagcaatttcctacgtcaggtgaccatgtgcttatggggcctggtgaaggtgcaggggtagtcgatataggtgataatcaagccgtagtatttaaagtagagtctcacaatcatccatcagcaattgaaccatatcaaggggctgctacaggcgttggtggaatcattcgtgacattgtctctattggggctagacctattaatttgttaaacagtcttagatttggagaattagataataaacaaaaccaaagattacttaaaggtgttgtaaagggtatcggaggttatggtaactgcattggtattccaacaactgctggtgaaatcgaatttgatgaacgttatgatggcaatccacttgttaatgcaatgtgtgttggtgttatcaatcacgacatgattcaaaaaggcacagcaaaaggtgtaggtaattcggtcatttatgttggtttgaaaactggtcgagatggtattcatggtgctacttttgcatctgaagaattgacggaagaaagcgaaagtaaacgaccttctgtacaaatcggtgatccatttgtaggtaaaaaattaatggaagcaacacttgaagcaattacatttgatgaattagttggtattcaagatatgggtgctgctggtttaacatcttcatcgtctgaaatggcggcaaaaggtggtagtgggttacatttgagattagaacaagtgccaacacgtgagccaggtatttctccttatgaaatgatgctttcagaaactcaagaacgtatgttactagttgttgaaaaaggtactgaacaaaaattcttagatttatttgataagcacgaattggatagtgctgttataggtgaagttacagatacaaatcgttttgttttaacatatgatgacgaagtttatgctgacattccagttgaaccactagctgatgaagcacctgtatatattttagaaggagaagaaaaagattataatacttctaaaaatgattatacacacatcgatgttaaagatactttctttaaattacttaagcatccgactatagcatctaaacactatttatatgatcaatacgaccaacaagttggtgccaatacgataattaagccaggacttcaagcatcggtagtacgtgtggaaggcacaaataaggcaattgcttcaacaattgatggtgaagcgcgttatgtatataacaatccatatgaaggtggaaagatggtagtagctgaagcttatcgaaatttaattgccgtgggtgcaacaccattagcaatgacagattgtttaaattatggttctcctgaaaagaaagaaatctatcaacagttgatagattcaacgaaaggtatggcagaagcatgcgacattcttaagacaccagtagtttctggtaatgtatctttatataacgaaacgaaaggtacttctattttcccaacaccagttgttggaatggtaggtttgattgaaaatgtaaattatttaaatgattttgaacctcaagttggagataaattatatttaatcggtgatactaaggacgactttggtggtagtcaacttgaaaagttaatttatggcaaagttaatcatgaatttgagtcattagatttgagttcagaagttgaaaaaggtgaatcaatcaagaccgctattcgtgaaggactattatcacatgttcaaacagttggtaaaggtggcttactgattaccttagctaaactaagtgcgcattacggtttaggattaaaatcttcaatagatataacaaatgcacaattgtttagtgagacgcaaggccgatatgttgtttctgttaaatcaggtaaaactttaaatattgataatgcaatagaaattggacttttaacagatagtgataatttcaaggtaacaacaccatatacagagattagtgaaaatgtttcagatattaaacaaatatgggaaggggcaattgctcaatgtttaactactcaggattaaacgaagaatgtggcgtgtttggtatttggaatcatcctgaagcagcgcaactaacatatatgggacttcatagtttgcaacatcgtggtcaagaaggtgcaggtatagttgtttctgatcaaaatgaattaaaaggcgagcgaggattaggcttactaactgaagcgattaaagatgatcaaatggaacgattaaaaggatatcaacatgcaattggtcacgtccgttatgctacttcaggtaataaaggtattgaaaatattcaaccgtttctgtatcacttttatgatatgagtgtaggtatttgtcataatggtaacctcattaatgctaaatcattgcgtcagaatttagaaaaacaaggtgctatcttccattcgtcttctgatactgaagtcattatgcatttgatacgtcgaagtaaagctcctacttttgaggaagcgttgaaagaaagtttgcgaaaagttaaaggcggttttacatttgcgattttaactaaagatgcgttatatggcgcagtagatccaaatgctatcagaccacttgttgtaggtaaaatgaaagatgggacatacatccttgcaagtgaaacatgtgcaatagatgtgttaggtgcagaatttgttcaagatattcatgcaggtgaatatgtcgtgattaacgataaaggtattacagttaaatcttatacacatcatacgacaactgcaatttctgcgatggaatatatttattttgctagaccagactcaacaatagctggtaaaaatgtccatgcagtacgtaaagcttctggtaaaaaattagcccaagaaagccctgtaaatgctgatatggtcatcggtgtacccaattcatcgctatcagctgcgagtggttatgctgaagaaataggtttgccatatgaaatgggactagttaaaaatcaatatgttgcaagaacatttattcaaccaactcaagaattacgtgagcaaggtgtgagagtgaagttatctgcggtaaaagatatagtagatgggaaaaatatcattcttgttgatgattccattgttcgcggtacgacaattcgacgcattgtgaaaatgttaaaagattctggtgcaaataaagtgcatgtgcgtatagcatcaccggaatttatgttcccaagtttttatggaatcgatgtttcaactacggcagaattaatttctgcaagcaaatcacctgaagaaattaaagattatattggcgctgattcattagcatatctatctgtagatgggttaattgaatcaattggtttagattatgacgcgccatatagtggcttatgtgtagaaagtttcactggagattatcctgcagggttatatgattatgaagcaaattataaagcacatttaagtcatcgacaaaagcaatatatttctaaaaacaaacacttttttgatagcgagggaaatttaaatgtctaaagcatatgaacaatctggtgtaaatattcatgctggttatgaagctgtagaaagaatgtctagtcatgttaaacgtacgatgcgtaaagaagttatcggtggtttaggtggattcggtgctacatttgatttatcacaattaaatatgacagcgccagttttagtttctggaacagacggagtaggtacgaaattaaaactagctatcgactatgggaaacatgattcgataggtatcgatgcagtcgcaatgtgtgttaatgatattttaacgacaggtgcagaaccattgtattttttagattacatcgctacaaataaagttgttcctgaagttattgaacaaattgttaaaggtattagtgatgcatgcgttgaaacgaatactgcacttatcggtggagagactgctgaaatgggtgaaatgtatcacgaaggtgaatatgatgtagccggatttgcagttggagcagttgaaaaggatgactatgtagatagttcagaagtgaaagagggacaagttgttatagggcttgcgtcaagtggcattcattcaaatggatatagtttagtgcgcaaattaattaatgaatcaggcattgatttggcatcaaacttcgataatcgtccatttatagatgtctttttagaaccaactaaattatatgtcaaacctgtacttgctttgaaaaaagaagtttctattaaggcaatgaatcatattactggtggaggtttttatgaaaatattccacgtgcattgccagccggatatgctgctagaattgatactacatcatttccaacgccaaaaatatttgattggttacaacaacaaggcaatatagacacaaatgaaatgtataacatttttaacatgggtattggctatacggttatcgttgatgaaaaagatgcatcacgcgctttgaagattttagcagaacaaaatgtggaagcctatcaaattggtcatattatgaaaaatgagtcaactgcaattgaattgttgggggtataacaatggttaaaattgcgatttttgcatcaggttcaggaagtaactttgaaaatatagttgagcatgttgaatcaggaaaacttgaaaatattgaagttacggcgctatatacggatcatcaaaatgcgttttgtatagatagagcaaaaaagcacgatattcctgtttatattaatgaaccaaaacaatttgattcaaaagcagcgtatgaacaacatttagtatcactattaaatgaagataaggtagagtggattattttagctggctacatgcgtctaattggtccagatttattagcttcatttgaaggtaaaatattgaatatacatccatctctattgccgaaatataaggggattgacgcaataggccaagcatatcatagtggcgatactattactggttcgacagtacattatgttgattgtggtatggatacgggagaaattattgaacagagacaatgtgatattagaccggacgattcaaaagaacaattagaagagaaagtaaaaaaattggaatatgagttatatccaagtgttattgctaaaattgtaaaataaggagtatgtatgtgatgaagaaagctattttgagcgtatcaaataaaacaggtattgtagagtttgctaaagcgttaacgcaattaaattatgaattatattcaacaggtggtactaaacgtatattagatgaagcaaatgtaccagttcgttctgtttcagacttaacacattttccagaaataatggatggccgtgttaaaacattacatccggctgttcatggtggcattttagctgatcgaaataaaccgcagcatttaaatgaattatcagaacaacatatagatttaattgatatggtagtagttaatttatatccattccaacaaactgttgcaaaccctgatgtgacgatggacgaagcaattgaaaatattgatattggtggtccaacaatgttacgtgctgcagctaaaaactataaacatgtaacaacaattgtacatccggcagattatcaagaagtattgacgcgattaagaaacgattcgttagatgagtcatatagacaatcattaatgattaaagtttttgagcatactgcagaatatgatgaagcgattgtacgtttctttaaaggggataaagaaactttaagatatggagaaaatccacaacaatcagcgtattttgtgagaacttcgaatgctaagcacacgattgcaggcgctaaacaattacatgggaaacaattaagctataacaatattaaagatgcagatgctacactagctttagttaaaaagtttgatacacctgctacagttgcggttaaacacatgaatccatgtggtgttggtatcggtgacacgatagaacaagcatttcaacatgcgtatgaagcggatagtcaatcaatatttggtggaattgttgcattaaaccgagctgtaacacctgagttagcagagcaattgcatagtatctttttggaagtcattattgcaccaaaatttacagatgaagcattagatattttaaaacaaaagaagaatgtaagattattagaaattgatatgactatagacagtaacgaagaagagtttgtttcagtatctggcggatatttagttcaagataaagacaattatgtcgtgccaaaagaagaaatgaaagttgttacagaagtagcacctactgatgaacaatgggaagcaatgttattaggatggaaagttgtaccatcagtaaaaagtaatgcaattattttaagtaataataaacaaactgtaggtataggtgctggacaaatgaatcgtgtcggtgctgctaaaattgcgttagagagagctattgaaatcaatgatcatgtagcgttagtatctgatggatttttccctatgggagatacagttgaacttgcagcacaacatggtataaaggcaattatccaaccgggtggttcgattaaagatcaagattcaattgatatggctaataaacatggtattgcaatggtagtcacaggcactcgacattttaaacactaattttaaaggggcgtaacataaatgaatgtattagtaattggtgctggtggacgagaacatgcacttgcatataaacttaatcaatcgaatctagttaaacaagtgtttgccattccaggtaatgaggcaatgacacctatagctgaagtacacactgaaatttcagaatctgatcatcaagcgatattagattttgctaaacggcaaaatgttgattgggtagttataggtccagaacagccgctaattgatggattagcagacattttacgagcgaatggtttcaaagtgtttggtccaaataagcaagcagctcaaatcgaaggctcaaaattatttgctaaaaagataatggaaaaatataatattccaactgctgattataaagaagttgagcgaaaaaaggatgctttaacatatattgaaaactgtgaattgcccgttgttgtcaagaaagatgggttagctgctgggaaaggcgttattattgcagatactattgaagcagccagaagtgctattgagattatgtatggtgatgaagaagaaggtactgttgtatttgaaacgtttttagaaggtgaagagttctcgctaatgacatttgttaatggtgatttagcagtacctttcgactgtattgcacaagatcataaacgcgcatttgatcatgatgaaggaccaaatactggtggtatgggggcttattgtccagtaccacatattagtgacgatgttttaaaacttacaaatgaaacaattgcacaacccattgcaaaggcaatgcttaatgaaggttatcaattcttcggtgtattatacattggtgctattttaactaaaaatggtccaaaagtaatagaatttaatgcccgttttggtgatcctgaagctcaagtattattaagtcgcatggaaagtgatttaatgcagcatattattgatttagatgaaggaaaacgtactgaattcaaatggaaaaatgaatctattgtaggggtcatgttggcatcaaaaggatatcctgatgcatatgaaaaagggcataaagtaagtggctttgatttaaatgaaaactattttgttagtggattaaagaagcaaggtgatacctttgttacttcaggtggtagagttatacttgccatcggaaaaggtgacaatgtacaagatgcacagcgagacgcatacgaaaaagtatcacaaatacaaagtgaccatttattctatcgtcatgacattgcgaataaagcactacaacttaaataagtaaatttaaaatactaagattagctatgaacgaatctataacgatagattttttcatagcttttttagttgtagagtctaggacattgatttctgtaccaaatttgtgattatgcatatgtaatacaaaagaggcgccacaacatgtttggatgaacaaaataacatgtttgtggcacctcttttgtttagtatggaataaatggttttctttttctatacaatgaatttctaatttagtatctatacaattatggataaaatttaacctacacgaccaagacgaacatcatctatgcccgtgatgggtaaggtgattgaacaataatatgccaaagtaataatggcaattaaaactataataaagattatatctttatatgagaaaggtacgttgtaatagtaagtacgaggaccatctctaaatcctttggactccatcgcaactgataattgatgtgcctttctaatattttggcttaatagaggtataattaaatgcttaaatcgctttaaccctctataatttgctgcgtctatcatctgatagcgcatttttaaagatctgcgaagctgtattaaagaactaatcattaaaggtatcatacgaatggcagccatgaatgcataagcaacttttgatttaacctttaaatgttgcattaaactataaaatatcatgacaacctgagatgtaagtgcgattaagataccgaaaaatgaaatagcaatggttcttaatgatacatgtaaaccacgaactaaactttctgttgtaatatggataaatccgaatttcaaaattgtatggctaccattcccgtataaaatcatgaacagggaagagagtaatgcaaagccaatacttatagttataaaaattgctgtaattttaaactgagtaccattaaacatcaataagaaaactaacattaagatagtgatataaagcataaaatcgaaattatgcacaaatataataaagaaaaatagtataattccaagaaatagtttcgttataatgttgacatcatcaacaaatgattgccgaactttccattgctcatacattcgtatcaccatcacaatctagtaacgcaccatctgaaattttaagtcttcttgatggataacgttcaattatttcatcgtcatgtgtaaccatgacaatactttgtcccaaattaattcgcttttggaaaagtttgatcaactggaatgtattatggctatcaagtccaaatgtcggttcatctaaaaagataatatcagctttagaacttagtgcggtagctacgctaaggcgtcgtttttgaccaatagacaactcataaggatgttgatcttttacattttgtaaatctaaaagttttaaaagttgtatcgtttcatcatcactttgatctttagaaaggtgattaaaatgaatgttaatttcatcataaaccgaatttgttataaattgtaattctgggttttgataaactaggtacatgtgttttgctgcatgtttaatttttgttaaacgctgattttcaaaataaacatcaccttgatatttaatcaattgcataattgattcaagcaaggttgttttaccactaccatttgcccctgtaattgtaatccactcacctagaccaatttctaaatctgagaatgagagcaatgttgatttaccgcgaataatacgtccatttttaaattgtaataagtgtgagtttgttgttggaaagtcaacacgacttggtgcgaattcccatgcacgtggatgccacacaccatattcactgagtaaatgaacatacttctgtaatatgatttcaggacattcatcggcaatgatatttccgttataatccatcaaaatgacgcggtcgacatgattccagatgtgtttaactttatgttcaacgattacaacagtttgatcttcccaaagttcaattagtttagtccataaatcttctgttgcttgaacatctaacattgctgtcggttcatctaaaaacaatgtttttgattgttgaagaatggtttcaacaattgccaatttctgtttcatcccgccacttaaatctttgatatacgtttcaggggtaacatttaaattgaccatatttaaagcattgataattaacgcatccatgtcttcacgtggtacttgtctattttctaaaacgaatgcaagttcttcgtatacttttggcatacaaaactggctatcagggtcttggaaaataacgccacttaatgggtcaacgattagttcatcatatttcataggtaattcaattaaattaggaacaataccacttaatacattcagaagtgtacttttaccgcaaccagaaggaccgagtaaaagtactttttctttgtcttgaatagtgatatttaaatgatcgaaaattttacgctgaccacttggatattttaatcgtaaatcacttacttttaacactctgaatgctcctcttataagttgtcgtaatcttctttagcagctggtctaaataattttgttacgcctgtcttatctaaagcttttactaaaaggtaagataggacgccggcgactactgcaccactaattaatctaaatacgatgaataatgttaagttccaacctgcaacttcatttaaataaccatagaaataatctatagggaaagccgcgattgctgtacaaaaacctgctaacatagctaccataactgaacgagattgatatttaaaaattgcaaagacaagttcacacgctaaaccttgtatgaaagcgtaaacgattgtcggaatatcgaaacgacccataatgatagtttcgccggcacctgcagcaaattcagccagtaaagcaatacctggttttggaataattagatagcagacaatcgctgccatgaaccaaaccccgtttgttaattgttcgaggtgaaggcctgtagcttgcacaccattgtaaacaaaccaccataaattgtaaataactgcgaatactactgaaataagtacggttactagtatttcagatagctttaaaccttttgacatttttacatcctcctaataaaaaaacgcacaaccatccataggaaagttatgcgttcacaatatatattagtaaaacatatgtatagtaacactttcctacgctagttcaagctagatcaggttcaaagggtttgagggcaagcctcatctcagtataaaacacccctagtgtgtgcgatttatttaattaattatactgtaagacgtttgtaaacttatgtcaataggttgtcttcatgaaattttgtttaattcgatttaaaatttataatattagcattggatttaaattgaagatgtagtaggaatgttagtaattaaagatataaaaatatgtgacatgtaataagattgagctgataaatgaagagggatacttatcaatcatacctctttaacaacagtgaagaacccgtgcataatggcttacgaattatagtttgtagggtaaaagagggatacatgcgccgagcacatgcaaaaaagcccctaacaactaaaagttgtaaggaagaagagggacacatgcgccgagcacatgcataaaatcccctaacaactaaaagttgtaaggggatttaaattaatttagtgtatcttggatatcttgttttgtttgattaatatcttctgttttttcttcttttttatcttttaatttttcttcaacttctttagctttttctgctgcttttttattttgattttcattagacatgattaattcctcccaaattggataattatttatatataaatcttacccggttgtactttcgttaaacttttctaagtctatagcactatttattcatttatctaaagacaacaacattagattaatatataatgattttgaggtgaacataatgtcttttcttaggaaacacgccgaaattatttttagctatttaatcggtatcgtttcactcttcactggtctcattattttaattaacttgccattaattaaacaattaaatggtggtaaaaaagttgatacacatgttcataatgtgtgggaatttctgaatgcatttttcagtgaaattattaaagtaatgagtcgatttataggtaatttccctatagttagtgcaattgtgataattatattcggtattttagttatgttgattggtcatacattacttagaactattaagtatgactatgatatttctatctttttcttagttatcggtatcatgtactttattattactcttatattaatgactcaagtttatggattctttgcagtgattttcattattccatttacaattcatataggatatatcgtctataaagatgaattgaatcaggaaaatgtaaaaaatcatttcatgtggataattgtgagttatggtataagttacttaattacacaaattgcattgtatggcagaattgatgctaatgaaatagagtcaattgatatcttaagtgtcaatgctttctttataattatgtggttacttggtcaaatggctatttggaatttcttgttcttgcgccgagctttacctttaacaaagcaagaattaggtgaagaggagccagaattatcaagaacaagtaaagggaatgtcacgaatcaaactaaaattcacttgaaacaactccaagataagactacagaatatgcacgtaagacaagaagaagtgtcgatttagataaaattagagctaaaagagataaattcaaaaagaaagttaatgatattatcgatattcaagaagacgatattcctgattggatgagaaaaccgaaatgggttaaaccaatgtatgtcgaactattttgtggtgtcgtcatctttttattcacatttttagaatttaataatcgtaatgcattatttgtatctggtgattggaaattatcacagacacaatatgttattgaatgggttacattactaattctgttattcattattatcgcatatatcgctacaacgttaactttccacttgaaaggtaagttttattatttacaactatttatggggagcattttattctttaaattgttaacggaattcataaatataatgattcatggactactactttcagtgttcattacaccaacattactattaatgttattggcaatcatcatttcttattcgttacaattacgagagcgaccataattaaaagcattataaaagtactatctattaaacattttgatgtgtacgctataagttagatatatctctaacttatttagatacaggtcaatgaagtttatggatagtactttttttgtaactagatttgattgattcaggtgatgtgaattaagtattgaaaattgtatacaaagttttagtgcaaataaaatagttgaaaagttatccatttgtaaaatcaagaaaactattaaatagttgaatcgacatttggaaattgcgaaacgatatatagtatttcctttgtagaaatttaacatatatcattcgaattactaatttgttaaaatcaacattaagattagaagtagatgatattgaaatttggcaaacaatttaatctatataaaactacaacgaaacacagaaaggaagttgtcagatgaaaatagcaactctgaacaaaggcaaagaaacaaaatattttaatggatatcctttaattgaagaagaggatatctattcacaagatcatttaaaagaaggagatatttttcaaattgtgactgataaatcacaatatgttgcaacggcttatgttggtcgccaacataaaggattaggttgggttctaacatacgataaagctcaagaaatcaacacagctttctttgtgaaattgtttaatactgcattagcagaacgtgattattattttaatatagatggaacaaatgcttttagattatttaatgctgaaggtgatggtgttgggggattaacaatcgacaattacgatggtcatttgttgattcaatggtactcaaaaggtatttataaatttaaatatgccattcttgaagcggttagaaaagtatttgattataaatctatttacgaaaaagtaagatttaaagacagcgaatatagtggtggttttgttgaaggagatgcacctgagtttccaattgttatcgaagaaaacttcacattttataatgtagaccttgaagatggtttgatgacaggtatctttttagatcaaaaagaagtgcgcaagaaattaagggatcaatatgccaaagaacgccatgttttaaacttatttagttatacaggtgctttttctgtaatagcagcaagtgaggcatcttcaacaacaagtgtagatttggctaatcgttctcgtagtttaactgaagaaaattttggattaaatgctattgatcctaaatcccaatatatttatgtcatggacacttttgatttctataaatatgctgcacgacatggacatagttatgacacgatcgtgattgatccacctagctttgcgcgtaacaaaaaacgtacattttcagtgcaaaaagattatgacaaattaattaatggcgccttaaatatcttatcatctgaaggaacattattgttatgtacaaacgcaagtgtatatccattaaagcaatttaaaaatactattaaaaagacgcttgaagagagtggcgttgattatgaattaactgaagttatgggattaccaaaagattttaaaacgcatccacattataagccatctaaatatttaaaagctgtttttgtaaatattagacattaatttgataaaaaggggtatagtaacttattgagaaaaagaagggtgataatattatgggattcaaaaacaatttaacatcaaatttaacaaataaaattggtaattcagtctttaaaatagaaaatgttgacggaaaaggtgcaatgccaacgacgattcaagaattgagagaaagacgacaacgtgctgaagcaattgtaaagagaaaatctttaatgtcatcaacaatgagcgttgttccaattccgggtttagattttggtgttgatttaaaattaatgaaagatattatcgaagatgtaaataaaatatacggattagatcataagcaagttaatagccttggggatgatgtgaaagaaagaattatgtctgcagcagcaattcaaggtagtcaatttattggtaaaagaatttcaagtgcatttttaaaaatagttattagagatgtagctaaacgtactgctgcaaaacaaacaaaatggtttcctgttgtaggacaagctgtgtctgcatctattagttactattttatgaataaaattggaaaagatcacattcaaaaatgcgaaaatgttattaaaaatgtcatgtaggtgctataatagttttgcaatttgcaaattttactgaaaccggttttaaacgaattgaatttaaagcatggttttggtaaagttaatgtataaaactaagttagtattgtaataatattgaagattctaactatacgaaggagaaatgtaattatggaacaaaattcatatgtaatcatcgacgagactggtattcacgctagaccagcaacaatgttagtacaaacagcttcaaaattcgattctgatattcaattagaatataacggtaagaaagtaaacttaaaatcaatcatgggtgttatgagccttggtgttggtaaagatgctgaaattacaatttatgctgacggtagtgatgaatctgacgccattcaagcaatcagtgacgtcttatcaaaagaaggattgactaaataatcatgtctaaattaattaaaggtattgccgcatctgatggtgtcgcaattgctaaagcttatttattagttgagccagacttaacattcgacaaaaatgaaaaagtcactgatgttgaaggagaagttgcaaagttcaatagcgctatcgaagcttctaaagttgagttaactaaaattagaaataatgcagaggttcaactaggtgctgataaagctgctatctttgatgcacatttattagttttagatgaccctgaattaattcaaccaatccaagataagattaaaaatgaaaacgctaatgctgctacagcattaacggatgtaacaacacaatttgttacaatttttgaatctatggataacgaatacatgaaagaacgtgcggctgatattcgcgacgtttctaaacgtgtgttatcacatattttaggtgtagaattaccgaatccgagtatgattgatgaaagcgttgttattgtagggaatgacttaacgccatctgatactgctcaattaaataaagaattcgtacaaggttttgctacaaacattggcggaagaacaagtcactctgcaattatgagtcgttctttagaaattccagcaattgttggtacaaaatcaattactcaagaagttaaacaaggcgacatgattatcgtagatggattaaatggtgatgtaatcgttaatccaactgaagatgagttaatcgcttatcaagataaacgtgagcgttattttgctgacaagaaagaattacaaaaactacgtgatgctgatactgttacagttgatggtgttcacgcagagcttgctgcaaatattggtacacctaatgatttgccaggtgttattgaaaatggtgcacaaggtatcggcttatatagaactgagtttttatatatgggtcgtgaccaaatgcctacagaagaagaacaatttgaagcttataaagaagtattagaagcaatggacggtaaacgtgttgttgtacgtactttagatataggtggagataaagaattatcatacttaaacttgcctgaagaaatgaatccattcttaggttaccgtgcgattcgtttatgccttgcgcaacaagatattttcagaccacagctacgtgcattattacgtgcatcagtttatggtaagttaaatatcatgttcccaatggttgcaacaattaacgaatttagagaagctaaagctatattattagaagaaaaagaaaaccttaaaaatgaaggtcatgacatttcggatgatatagaattaggaatcatggtagagatacctgcaacagcagcattagctgatgtctttgctaaagaagtagatttcttcagtatcggtacaaatgatttaattcaatacacattagctgctgaccgtatgtcagagcgtgtatcatatctataccaaccatataacccttcaatcttacgtttagttaaacaagttattgaagcgtcacataaagaaggtaaatggacaggtatgtgtggtgaaatggctggagatgaaacagctattccattattgcttggtttaggtttagatgagttctctatgagtgcaacgtctattctgaaagcaagaagacaaattaatggtttaagtaaaaatgaaatgactgaacttgctaaccgtgcagtcgactgtgcaacgcaagaagaagttattgaattagttaacaactacgtaaaataattaattctttcgaaagacagaattataaataaacccgaagtattcattgtgagtaattatgaatacttcgggttcttttttatgatttatgttaatttcaatggaatgttgttgctaactaattaaacaactatgtgtcattaacaaaatgttgttctttaattaatgttagttaatttaaaaatcgatatttaatttatgatagctataaatgatgaagttgatttagatgaaaattaatcttggatatttaatactttgttgatttcatcaagatcaacatggtacattggattaccattcaacaaaataaacggagttgaaaaagcatcaaaatctatcatttcgtttcgatattgttgattgttgatatttctctcttcaaaatcaatttgatgctcattaagataattttttacaaatgtacaaggtgggcaatcattctgcgtataaacgattatttctgacatgtatcatgctccttcgtgttttattctaatgtaatatacacaattatacattgaaattcaaatttgtgaacacattgtgaactgacataaattatacacaatttcatagcgcataatgttttaaaaatacacattatagcaattataattaagttcattgtgttgtcatcaaaaaaagaaaaaggtgatgtttttaaatggatacagttgaaatcagtcggtttttgacagctatgactttagcagttcatatcatttttgcaacgattggtgttggtatgcctttaatgttcgcaattgcagaatttttaggtattcgcaaaaatgatcttcaatatatagctatggccaaaagatgggctaaagcttatacaattactgtagcagtgggagttgttacaggtacaattataggacttcaattatcattgatttggcctacatttatggaaatgggtggacacgttattgcacttccattatttatggaaacatttgcgttcttctttgaagctattttcttaagtatatatttatatacttgggatcgttttaaaaataaatggacacatttcttaattagtataccagtaattattggtggctctttctcagcattcttcattacttcagtgaattcatttatgaatacgcctgcaggttttgagttgaagaatggaaagatggtcaatgttcaacctatagaagcgatgtttaacccatcgtttatagttcgatcatttcacgtaattactacagccggtatgacgatggcatttgttattgcatcaatagcagcttttaaattattgcgtaatcgtcaacctaaagatactgtctaccataagaaagctttgaaaatgtctatgatagttggattcttttcaacattactttctatgttggcaggggatttatctgcaaaatttttgcataaattccaacctgaaaaattagcagcttatgaatggcatttcgatacatcttcccatgctaaattattattatttggtgtgttagatgaaaagactcagcaagttaaaggtgcgattgaattacctggactattgagtttcttagcagataatagtgtcaaaactaaagtgcaagggttaaatgattttccaaaaagtttacatccgcctatgattgtccattatttctttgatttaatggtaacgatgggaattttatgttttgtcatttcaggtgtttatgttttaactttaatgtttaaaaagcttagaaagttttctactcataaatggatgctttacggaatattattaacaggaccagcttcaatgctagctatagaatttggatggttcttaacagagatgggtagacagccttggattgttcgtggttatatgcgcgtggcagaagcagcaacacaagcaggcggaataaccttcgttacaattttatttggcatattgtacatcattttaatgtatacatgtgcatacgtattaattcgtatgtttaaaaataaaccggcgtatgaagatgtaaatcgtttagccaagaagcaaggaggagaaatagaaaaatgatttatgcatttataggtataacagtgttatggttgtttttattttgctatatcattattgcttctatagattttggggcaggtttcttcgcattgcattcaaagttaactggtgatgaaaagaaaattaatcacttaatttcacgttatttaaacccagtttgggaagttacgaatgtattctttgttttcttcttcgtaggattcgtaggtttctttccagagtcaatcaaatatttaggcacggtattgttaataccaggttcaatagcactgattatgatatcgttgagaaacagtttttatgcatttgaaaattatggtcaagatacaaaattagcatggatgatcatgtatggggtaagtggattattaattccagcttcattatctactgctttaactattacagaaggtggctatattaatgttcgaaacaatgttatcgatctagattgggtgcagttactattaagcccatttgcttggtctgtagtattcttggcaattatttcagttttatatatttcatcaggatttttgacatattatgctaaaaaagcaaatgacgaaccagcatataatttaacaagacaatggcacatatttttagggccgccgatgattatcatttgtttattcgtatttctatcattacgcattcaaaattctgaacatttttattcagctgtttttgactattggtggatgtttgctataagtttcttattctttgcattagcttcattgttaacattctttaagaaaaaacatggtttggcttttgtatttgttattttacaaatgatgttcgcgttctttggctatggaattagtaaattgccataccttttatatccgtttgtaaaaattacagatgcatatgttaatccagaaatgggctggacattagtgattgtctttattttaggtttacttttattacttccatcgttaatattattattaagattatttgttttcgacaaagaatatgttgaaggaaagaaatcataagttgagacgataccccaactttcatttacttgcattactgcatttagataatttagttggggtactcatttataataattttaaatttatattttcaatgaattgatgaaaatcatttaatggagggcgagtatgggtaaagaatatgtagtcatcggtctaggtcgttttggaggtagtatcgttcgtgagttgaatgcattagacatggatgtaatggccatcgaccatgatgaaaatagagtgaatgaatatagtgatatcgctactcatgcggttgttgcagacacaacagatgaagcagttatgaaaagtttaggtatccgtaactttgatcatgtcattgtggcaattggtgaaaatattcaatcaagtacgttgacgactttaattttaaaagagttaggtgtaaaaaaagtaactgctaaagcacaaaatgattatcatgcaaagattttaaataaaattggagcagatacggttgtgcaccctgagcgtgatatgggtagacgtattgcgcataatgttgcgagtgcaagtgtacttgattatcttgagttggcagacgagcattctattgtagaattgaaagcaactgaaaagatggcggggcagtctatcattgatttagatataagagcacaatatggaattaacattattgcaattaaacgaggcaaagagttcatcatttcaccaaatccaaatattaatttagaaataggtgatattttaatcatgattggacatgataatgatttaaatcgctttgaaaaaaatattgcgacgagataatcgggagtgggacagaaatgatattttctcaaaatttatttcgtcgtcccaccccaacttacattgtctgtagaaattgggaatccaatttctctttgttggggcccacaccccaactcgcattgcctgtagaatttcttttcgaaattctctatgttggggcccctgactagaattgaaaaaagcttgttacaagcgcattttcgttcagtcaactactgccaatataactttgtagagcattgaacattgatttatgtctcaagctcatcatatataaagaaaaagctactaacaatgggtggtgagtttaattaaaacttcacttcaaagttagtagctttttgattatttattgtttgattctttttgttcgtttaccttcataatgactggtaaaatcattggttttctagctgttttttcaaataaataaggttgtaatgtttcaatgatagaagatttaatctgatgccattgaatatctttattttgatttaacttactaataacatcagttttgattttgcgttgtgcatcataaattaattgacctgattccctcatatatacaaatcctcgagaaataatgtctggaccagaaagtaatttatttgtattaaaatcaatactaacaacaacgataactaaaccttcttcagataatagcttacggtctcttattacaacattaccgatatcaccgataccactaccatcaacaagtacattaccagatggaatgcgaccagctttacgtgctgaatcgtgtgttaaagctaagacatctccaatatcaaagatgaagacattatcttcttcaacgccgcattcaacaccagtctcaccatgtgcttttaacatacggtattcaccatgaataggtaagaaatatttcggcttgattaatcgaagcattaattgttgatcaccttgagaaccatgccctgaagtatggatgttagaaatcttgctatggataacatctgcaccagctttatacaaggaattaatagttctgttaatactttttgtattacctgggataggtgatgaactaaatacaacggtatcttcaggtataattttaatttgcttatgagtaccattagcaattctagataatgctgccattggttcaccttgtgaaccagtacatagtatcaataactcatgcttcggtacggtattaattttattaggttcaataaatgtttcaggtggtgctttaatataaccaagttccataccgattttaatattgttttccatcgaacgaccgaacgtaacaattttacggttatttttgatagcagcttcaactgcttgttgaactcggtaaatattagaagcgaaggtagcaaatataatacgacctttacaattacggaagatcttatctacgttttgaccaacttcacgttcgcttaaagtaaaatcaggcacaagtgaatttgttgagtctgaaagtaaacatagaacgccttcttcgcctaattgagccattttagcaatgtttgctggtttgcctacaggtgtaaaatcaaatttaaagtcaccggtatgaactacttttccttcaggtgtatctacgatgacgccataagtttcaggaatactatgcgtagttaagtagaaagaaatcgtaaagtgcttagatttaatcacactgtcctcattgatttcatttagtttagcagtacgtaataaatgatgttcttcaagtttattacggattaaacctaatgctaaaggaccaccataaataggtatattaagttgttttaataggaagggcacaccgcctatatggtcttcgtgaccatgtgttataaataggccaacaattttatcttggttttgaactagatatgtgtagtcaggtataacataatcaatccctaataagttatcatctgggaatttgatacctgcatcgataatgacaatttcgtctttatactcaactgcataagtatttttaccgatttcacctagacctccaagtgcatatacacctacttcatttggatgtaattgtttcattatttagcaatctccacattaaagtgttctgagttttctttttcgtaatctaaatgtgcgccctctaatttagtgataaattcgatattaaaattacgatctttcaagtaacgacgtacttgttcttctgtttgagcttcaacataaagtgattgtgtattttcacgcacaattacctcgtctctgttatgttgataaaaaactttaaatactgccatgttaaaaattcctcctaagaatgtttgtttaatttattgttaaccctagtaaaatcgtattggagtatatatcgataaattcattccaatcatctctataatgtaacttaataacgatttggttaataactaggttcatcatgtcgttcattttaaaaaattagtgaaataacactaaaatttcagttaaatcttattttacatgatgaatgataataaataaagcagtttatctcactagaaatcgaagtatttcgaataaatgtgcagttctatttattaaaataaatgtagagattataaattaatgttaagaaagaattaaaggattttatatgaaacggtaaaatttaaatgaggggataaaaagtttggtagaaaggtgaatatatttaactgttgtttattcgaaaaagttgtacaagaaaaagcttaggacataatatttatcctaagctttgataattagtaaaaatgtgctttaaacttctacagcatctgtatgtggttgtaatgggtgatctttgtcaatgtgatcatagaacattacaccatttaaatggtcaatttcatgttggaaaacaattgctggatatccttttagacgtaattgtatatcattaccttcgatgtctttggctttaattgtaattctattatgacggtgaactagaccagcaacattatcatcgacactaaggcaaccttcaccagttggtaaataagcttcttgaacgctatgacttacaatttttgggttcacaagcatatagtcataagatttgccactgccatcatctggtattaaaacagcaatcatacgtttagaaatattaatttgaggtgcagccaaaccaacgcctgaacgtaaaccatatcgtttcgcgatttcctcatcttgactatttactaaaaactctctcatggcgattaatgtttctttttcttctttagttaatggtaattctaactcagctgctttttgacgcaaagttggatgaccatctctaatgatgtctttcattgttaacatatattgcaccttccttattttaatttgttttagttgaatgacagtaaaaaggttgttaagatactcatacatttttatgtgtaaatatctacaaagttaaccaactactgccaatgtttattttagatagtatatgtaaattttcagatatgctaattgcttaaaaaatgattaaagtgttggtttcaagcaatgatactttagaaatttatttatcatcttgactttaaaaattatattataaatgacgtaactgtcaacagatatacttagtaatgaagatgtgtaatgtaattgtttaaaattgatttccaagcagattttatttatcatttaatttaaatagcaagtggaggtacaagtaatgaaatttggaaaaacaatcgcagtagtattagcatctagtgtcttgcttgcaggatgtactacggataaaaaagaaattaaggcatatttaaagcaagtggataaaattaaagacgatgaagaaccaattaaaactgttggtaagaaaattgctgaattagatgagaaaaagaaaaaattaactgaagatgtcaatagtaaagatacagcagttcgcggtaaagcagtaaaggatttaattaaaaatgccgatgatcgtctaaaggaatttgaaaaagaagaagacgcaattaagaagtctgaacaagactttaagaaagcaaaaagtcacgttgataacattgataatgatgttaaacgtaaagaagtaaaacaattagatgatgtattaaaagaaaaatataagttacacagtgattacgcgaaagcatataaaaaggctgtaaactcagagaaaacattatttaaatatttaaatcaaaatgacgcgacacaacaaggtgttaacgaaaaatcaaaagcaatagaacagaactataaaaagttaaaagaagtatcagataagtatacaaaagtactaaataaggttggtaaagaaaagcaagacgttgatcaatttaaataattaatataatacagatggtaggaaacaactaatacagttcctattatctgtatctttttttattaaaacagaactttttcaaatggtttaacagtcccatttatttgtggtacaattattaaggataaaatgaatttctatacaattatgggaaaggtatggtgaattgaatggctcctaagttacaagcccaattcgatgcagtaaaagttttaaatgatactcaatcgaaatttgaaatggttcaaattttggatgagaatggtaacgtcgtaaatgaagacttagtacctgatcttacggatgaacaattagtggaattaatggaaagaatggtatggactcgtatccttgatcaacgttctatctcattaaacagacaaggacgtttaggtttctatgcaccaactgctggtcaagaagcatcacaattagcgtcacaatacgctttagaaaaagaagattacattttaccgggatacagagatgttcctcaaattatttggcatggtttaccattaactgaagctttcttattctcaagaggtcacttcaaaggaaatcaattccctgaaggcgttaatgcattaagcccacaaattattatcggtgcacaatacattcaagctgctggtgttgcatttgcacttaaaaaacgtggtaaaaatgcagttgcaatcacttacactggtgacggtggttcttcacaaggtgatttctacgaaggtattaactttgcagcagcttataaagcacctgcaattttcgttattcaaaacaataactatgcaatttcaacaccaagaagcaagcaaactgctgctgaaacattagctcaaaaagcaattgctgtaggtattcctggtatccaagttgatggtatggatgcgttagctgtatatcaagcaactaaagaagcacgtgaccgcgcagttgcaggtgaaggtccaacattaattgaaactatgacatatcgttatggtcctcatacaatggctggtgacgatccaactcgttacagaacttcagacgaagatgctgaatgggagaaaaaagacccattagtacgtttccgtaaattccttgaaaacaaaggtttatggaatgaagacaaagaaaatgaagttattgaacgtgcaaaagctgatattaaagcagcaattaaagaggctgataacactgaaaaacaaactgttacttctctaatggaaattatgtatgaagatatgcctcaaaacttagcagaacaatatgaaatttacaaagagaaggagtcgaagtaagccatggcacaaatgacaatggttcaagcgattaatgatgcgcttaaaactgaacttaaaaatgaccaagatgttttaatttttggtgaagacgttggtgttaacggcggtgttttccgtgttactgaaggactacaaaaagaatttggtgaagatagagtattcgatacacctttagctgaatcaggtattggtggtttagcgatgggtcttgcagttgaaggattccgtccggttatggaagtacaattcttaggtttcgtattcgaagtatttgatgcgattgctggacaaattgcacgtactcgtttccgttcaggcggtactaaaactgcacctgtaacaattcgtagcccatttggtggtggcgtacacacaccagaattacacgcagataacttagaaggtattttagctcaatctccaggtctaaaggttgttattccttcaggcccatacgatgcgaaaggtttattaatttcttctattagaagtaatgacccagtcgtatacttagagcatatgaaattgtatcgttcattccgtgaagaagtacctgaagaagaatatacaattgacattggtaaggctaatgtgaaaaaagaaggtaatgacatttcaatcatcacatacggtgcaatggttcaagaatcaatgaaagctgcagaagaacttgaaaaagatggttattctgttgaagtaattgacttacgtactgttcaaccaatcgatgttgacacaattgtagcttcagttgaaaaaactggtcgtgcagttgtagttcaagaagcacaacgtcaagctggtgttggtgcagcagttgtagctgaattaagtgaacgtgcaatcctttcattagaagcacctattggaagagttgcagcagcagatacaatttatccattcactcaagctgaaaatgtttggttaccaaacaaaaatgacatcatcgaaaaagcaaaagaaactttagaattttaatacattttaaaagttaacgaagttagcgtattttagtctcattgattaaaatgaaatgtttaatttacgaaatcttaggagggcaaaaacgtggcatttgaatttagattacccgatatcggggaaggtatccacgaaggtgaaattgtaaaatggtttgttaaagctggagatactattgaagaagacgatgttttagctgaggtacaaaacgataaatcagtagtagaaatcccatcaccagtatctggtactgtagaagaagttatggtagaagaaggtacagtagctgtagttggtgacgttattgttaaaatcgatgcacctgatgcagaagatatgcaatttaaaggtcatgatgatgattcatcatctaaagaagaacctgcgaaagaggaagcgccagcagagcaagcacctgtagctactcaaactgaagaagtagatgaaaacagaactgttaaagcaatgccttcagtacgtaaatacgcacgtgaaaaaggtgttaacattaaagcagtttctggatctggtaaaaatggtcgtattacaaaagaagatgtagatgcatacttaaatggtggtgcaccaacagcttcaaatgaatcagctgcttcagctacaagtgaagaagttgctgaaactcctgcagcacctgcagcagtaacattagaaggcgacttcccagaaacaactgaaaaaatccctgctatgcgtagagcaattgcgaaagcaatggttaactctaagcatactgcacctcatgtaacattaatggatgaaattgatgttcaagcattatgggatcaccgtaagaaatttaaagaaatcgcagctgaacaaggtactaagttaacattcttaccttatgttgttaaagcacttgtttctgcattgaaaaaatacccagcacttaacacttcattcaatgaagaagctggtgaaatcgttcataaacattactggaatatcggtattgcagcagacactgatagaggattattagtacctgttgttaaacatgctgatcgtaagtctattttccaaatttcagatgaaattaatgaattagctgttaaagcacgtgatggtaaattaacagccgatgaaatgaaaggtgctacatgcacaatcagtaatatcggttcagctggtggacaatggttcactccagttatcaatcacccagaagtagcaatcttaggaattggccgtattgctcaaaaacctatcgttaaagatggagaaattgttgcagcaccagtattagcattatcattaagctttgaccacagacaaattgatggtgcaactggccaaaatgcaatgaatcacattaaacgtttattaaataatccagaattattattaatggaggggtaaaacatggtagttggagatttcccaattgaaacagatactatagtaatcggagcaggtcctggtggatacgttgcagcaattcgtgcagctcaattaggacaaaaagtaacaatcgttgagaaaggtaatcttggtggtgtttgcttaaacgtaggatgtattccttcaaaagcattactacatgcttctcaccgttttgttgaagcacaacattctgaaaacttaggtgttattgctgaaagtgtttctttaaacttccaaaaagttcaagaattcaaatcatcagttgttaataaattaactggtggtgttgaaggcttacttaaaggtaacaaagttaacatcgttaaaggtgaagcatatttcgtagataacaatagcttacgtgttatggacgaaaagagcgcacaaacatacaactttaaaaatgcaatcattgcaacaggttcaagaccaattgaaattcctaatttcaaattcggtaaacgtgttatcgactcaacaggtgctttaaacttacaagaagtaccaggtaaattagttgtagttggtggaggatacattggatcagaattaggtacagcatttgctaactttggttcagaagtaaccatccttgaaggtgctaaagatatcttaggtggcttcgaaaaacaaatgacacaacctgttaaaaaaggtatgaaagaaaaaggtgttgaaatcgttactgaagctatggctaaatcagctgaagaaacagataacggagttaaagttacttatgaagctaaaggcgaagagaaaacaatcgaagctgattatgtattagtaactgtaggtcgtcgtccaaacacagacgaattaggcctagaagaattaggtgttaaattcgctgaccgtggattattagaagttgataaacaaagccgtacgtctatcagcaatatctatgcaattggtgatatcgttccaggtttaccacttgctcacaaagctagctatgaagctaaagttgctgctgaagcaattgatggtcaagctgctgaagttgattacattggtatgccagcagtatgctttactgaaccagaattagctacagttggttattcagaagcgcaagctaaagaagaaggtttagcaattaaagcttctaaattcccatatgcagcaaatggtcgtgcattatcattagatgatactaacggatttgttaaacttattacacttaaagaagatgatactttaatcggtgctcaagtagttggtactggtgcatcagatattatctctgaattaggtttagcaattgaagctggtatgaatgctgaagatatcgcattaacaatccatgcacatccaacattaggtgagatgactatggaagcagcagaaaaagctatcggatacccaatccatacaatgtaataactgattatctataaagattcagtcattaaaagctgtagcatatgctacggcttttttgttttaggtaaagtaatgtaaggaaattgatttgagatatcgttaacatgtgacatgcatgttatactagcgatgctaacaaaagaattgaaatggagggttcaacaatggaatatgagtatccaattgatttagactggagtaatgaagagatgatttcagtgataaatttctttaatcatgtagagaagtattatgaatccggcgtgacggcaggcgactttatgggtgcatataaaagatttaaagaaattgtgcctgctaaagcagaggaaaaacaaatttttaatactttcgaaaaaagtagtggctataatagttacaaagcagttcaagatgtaaaaactcactctgaagaacaaagagtaacagctaaaaaataattcgttcgaaattaatacaatttaataggaatttttctttaaaactattgctaataaagctatattttgatacctttatcaagtgttaaacaaaatgtttgataaaagtaaacttaatatagcttttttaggtggaaaaataaatgaacataggtaataaaattaaaaatcttagaagaattaaaaatttaacgcaagaagaacttgctgaacgtacagacttatcgaaaggctacatttcacaaatagaaagtgaacatgcctcaccaagtatggaaactttcttaaatattatagaggtgttaggaacgacgccaagtgaattttttaaagacagtgaaaatgaaaaagtattatacaagaaggaagaacaagttatttatgatgagtatgatgaaggttatatattaaattggttagtttcaaagtcaaatgaatatgatatggagccattaatattaactttaaagcctggagcatcatataaaaattttaatccatcagagtctgatacgtttatttattgtatgtcaggtcagataacacttaatttaggcaaagagatatatcaagcacaagaagaagacgttttgtattttaaagcacgagataatcatcgtttgtcaaacgaatcaaacaatgaaacacgaatacttattgtagcgacagcttcatatttataggggggatcttatttggaaccgttattatcattaaaatcagttagtaaaagctatgatgatcttaatatcttagatgacatagatattgatattgaatcaggatacttttatacattattaggtccttcaggttgtggtaaaacaacaattttaaaattaattgcagggtttgaatatcctgacagtggtgaagtgatttatcaaaacaaaccaattggtaatttaccaccaaataaacgtaaagtgaatacagtctttcaagattatgcattatttccacacttaaacgtctatgataatatcgcttttggtttgaaattaaaaaaattatcaaaaaccgaaattgatcaaaaagtaactgaggcattaaaattagtaaaactttcaggttatgaaaaaagaaatattaatgaaatgagtggcggacaaaagcaacgtgttgcaattgcacgtgctatcgtaaatgaaccagaaatattattgttagatgaatctttatccgcattagatttgaaattgcgtactgaaatgcaatatgaattacgagaattgcaatctagattaggtattacatttatatttgtaacacatgatcaagaagaagcgttagcattaagtgactttctttttgtattaaaagatgggaaaattcaacaatttggcacaccaacagatatatatgacgaaccagtgaatcgatttgtagctgattttattggagaatctaatattgttgaagggcgcatggttagagattatgtcgtgaatatttatgggcaagatttcgaatgtgtcgatatgggtattcctgaaaataaaaaagtagaagtcgttattcgaccagaagatatatcattaatcaaagctgaagaaggattatttaaagcaactgttgattctatgttatttagaggggtccactatgaaatatgttgtatagacaataaaggttatgaatgggtaatacaaacgactaaaaaagctgaagtaggcagtgaagttggtctttattttgatcctgaagccattcatattatggttcctggagaaacagaagaagaatttgataaacgtattgaaagctatgaggaagtagacaatgcgtaatactaataaatttctcttaatcccgtatttactatggatggttatatttattattgtaccagttgtattactcatttatttttcatttttagatatcaatggacattttagtttcacgaattatcaacaaatttttactacaaaatatttgaaaatgtttgcatattcaattttatatgccgctttaataacaattattaccttgactatcagttatccagctgcctattatattactcgttcgaaatttcaaaatatcttattaatgataatgattattccaacatggataaatttattgttaaagacatatgcttttataggtttattaagtcatgatggcgtgattaatcaatttttccacttatttaatttaccatcattcaatttgttatttacaactggtgcgtttttagtagtggcaagttacatttatataccatttatgattttacctatatttaatagcatgaaagcaattcctaataatttattgcaggcctcaagtgatttaggtgccagtcctttctatacttttagaaaagtaatcatgccgttaacaaaagaaggtgttatgactgggattcaagtaacctttattccatcactttcattatttatgattacaagattaattgcaggtaataaagtcataaatataggtacggcaatagaggaacaatttttaacaattcaaaattatggtatgggatcaactatagctatattcttaattgtatttatggcattcattttaatcattacaaaatcatctaatgggagagggtgaatcatatgaaatggtatggaaagctgtatatcgggatacttttagcgattttatacatcccaatattctttttaatgttctattcattcaattcggctggtaatatgattcactttgaacattttacattagagcattatcaatcattatttcaaaatgatcatttaatgtcggtcatttttaatacgatagctgtagcacttttagcagcctcaatttctacagttattggtacatttggtgccattgctatttattatttaagaaataaaaagtttaaagtaactttactaacattgaataatgtcttgatggtatcatccgacgttgtcataggtgcatcattcttaattatgtttacaacgattggccattttactggtcttggtttaggattttggacagttctaatatctcatattgcattttgcatacctatagttgtgattatcgtcttaccacaactgtatgaaatgaataataatatgttaaatgctgcaagagatttaggagcgactgaaccacaattattaagcaacattattattcctaatattttaccttctattataggaggattctttatggctttaacttattcactagacgatttcacagtaagtttcttcgttactggtaatggctttagtgtgttatcagttgaagtttatgctatggcgagaaaaggaattagtatggaaattaatgcgatttcaacattactgtttgctgttattgtattaggaatactaggatattatttgattcaatacgtgataaataagaaaaaactaatcaagcgaggtgtaaaataatgaaacgttttttacaactcattataggtgcattagttgtgggtatgctttgtcttactttaagtcattggtttaaatctaaagaacaagtgcatacaaatcaaaaaatttacgtatacaattggggcgaatatattgatccagagttaattaagaaatttgaaaaagaaactggcattcaagtcgtttatgaaactttcgattcaaatgaagcgatggaagccaaaattcgcaatggcggtacacattatgatgttgcttttcctagtgaatatacagttcaaaaattgaaaagagatcatttattgttaccaatagatcataataaggtacctaatattaaaaatttagattcagattatatgaatatgtcatttgatagaggcaataaatattctttaccttatttctttggaactgtaggtattttatataataaagaaaagtatccaaatgaatcatttgatagttggaagtcattgtataatcctaaatttaaaaaccaaattttactagttgacggtgctagagagattataggcatgagtttgaataaacttgggtataatcttaatgaccgtaattcgcaccatttaaaagaagcagagcgagatttaaccaaactagcaccacaagtaagaggtgtcgtaggtgatgaaattaccatgatgcttcaacaaaatgaaggtaacatagcggttgtttggagtggtgttgcagcacctctagtgcaagaaggggataaatataattatgttattcctaaagaaggatcgaatttatggttcgacaatatggtaattccaaaaacggcacaaaataaagagggtgcatataaatttatgaattttttattagatgctaaaaataacaagcaaaatacagaattcgtaggctatgcaacgccaaacaaggctgctcgacaattgttgcctaaagagattaaagacgaccatcgtttttatccgactaagaaagagcaagaacgccttgaagtttataaagatttaggacctgaagttttaagtgaatacaatgaaaactttttgaatttcaaaatgtcattaaaataaaatcataaatagtagttatttactgtatatttagttataataacgggataagtactataaggagttgtaacgaatgactggagaacaatttactcaaattaaacgtccagtaagtagattaactgaaaaagttctaggttggttatgttgggtgatgttattagtgcttactgtcattacgatgtttatagcacttgtttcattcagtaataacacatcgattgctaatcttgaaaatacattaaacaataatgcatttatccagcaattattagctggaaatggctataatacaacacaatttgtaatatggttacaaaatggtatatgggctattatcgtttactttattgtttgtttgttgatttcatttttagctctcatatctatgaatataagaatcttgtcaggtttcttattcttaatatcagcaattgtaacgattcctttagttttacttatcgttactttaatcattccgatattattctttattattgcgatgatgctatttataagaaaagataaagttgaaatggttgcgccacaatattatgaagagtataacggaccgatttatgattatcgtgaacctgtgtatgagcgcccccaaccgaaagatgattattatgatgtgcctaaatatgaaaaagaattggataaatcaaatactgtatatgatcaagaacaggaaagagataaatatgatcaatttcctaaacgtgcagttgaaagtgaatataatcatgatgagcgcactgaggaagaaccatcagtattatccagacaggctaaatacaaacaaaaaagtactgaagaactaggtattgaagatgatggttattatgcagaacctgaagttgatccaaaagaattgaaagcacaacaaaagcgagaaaaagctgaaattaaagctaagaaaaaagaaaaacgtaaagcttataaccaacgaatgaaagaacgtaggaaaaatcaacctagcgcagttagtcaacgtcgaatgaattttgaagagcgacgtcaaatttacaacaatgatatttctgaagaacgcaattcaagtgaagttaaggacaaaaaagagcaagaataaatattgatgatacccagattagtaagcagaggtcttttgcttattaatctgggtttttatatgaggttaattatcgataacgtttaattaaagtgtttaggtgtcataattttaaatgacgatttctcattactatacacctaaattatcatcaatctgaattcagatgtttattataaaaattagatgaaaaatatgttaatatacaagtaatttaatgtgcgtatatctataggctcgtagtatacttattaaaatattaaacaaagaaaggattttaagatgaatagaaaacctgaattaatcatggcttggattgcaaatagtattagtattatttatttattagttatggggctatcctatttttctttaaaaagtggtaatgcatcacaacgtgaagaattagcgaagcaattatctcagaacggtggcaaggtttctttagatatgcttcagacaacaatgggtgcattagcaattattttattaatttcaacactttatggtatatttgcgacaatttgtattaaaggacgtagaaaattatcgattatactttttgttatcgcgataattgtaagtttgatggctcttaatttaattgcaattgtcttatgggttatcgtgatgattatgttgatttctaaaaaagaatcaaaagaaactacacataaggacgatgagtatatttatcattaatatgttcatagcaaaagaaaaaccattaaaatgttaagttgttaattattagatacaaccagcattttaatggttttatttttaactttgtagttcttggaatgtttgaacgattaaatagacatttaaaatacttagaataataataagtgtccatgaaatgatattaacccatgttttattatagaaaggtcccatcaagtctttattactagtagccaattgtaatggtattaaacagaatggcagagcaatacttaaaaatacttgagagaatacaagtagttgctcaattttagctgcattacctttaaaaatgattaagcatacgataacaggaatgacagcaagggaacgtgtaattaaacgtcttaaccaatttggtatgtgtaatcttaaaaatccttccattacaatttgtcctgctaaagtaccagtaatcgttgaattttgacctgacgctaataatgcaactgcaaataatgtactcatgattgcacccattgttgcacctagtacaggttcagtttttaaggcgtgatataaatcatagaaaccacctaaatcgtcagcgtttgagttgaaaaatagtgatgcacctaacactaataataagcaattgactacaaatgcgattgataactgaatgttcgaatctatcgtagcaaatttaatcgcttgcgccttttcttcattgttatgtcttgagtatgttctagattgtacaattgatgaatgtaagtacaaattatgaggcataattgtagcgccaataatacctaatgcaatatagagaatgccgttatttgtaatgatttcactatgtggtataaatccatttaacacagcattcaactgtggtgatgaaatatagacttcaaatataaagatgaataacactgtgaaaattaatgtaccaacaatagcttcaatttttctaaaaccatatttcattataaatagtagtaaaaatacatcaagtacagttattagtgcaccgacgattaaaggtatgttaaataggagattaagagcaatagcactaccaataacctcagcaatatctgtagcgataattgctagttctgcaatgatccaaaagattatagcaataggtcttgataaataatgtcgtgtcatttgagctaagtccatacctgttgctattcctaatctcactgtcatgctttgaagtaacattgctgataaacttgaaataagaattacgaatagcaaagtatagccatattgcgcgccaccttgcattgatgttatccagtttccgggatccatgtaaccaacagcgactaataacccaggcccaagaaatgataaaaatttctgtttatttgaactgcgatgatcgaatttaattgtattgtttatttcgtctaaacttaattgttcatttgttgaatgtcgtttattattcattttgactcacctctacttcttatggacaatataataacctaataaaatgtttaggtcaacctaaatttattttaatttttttaaaagtatgaattattatgttgaacgttcgatttaatattaagaaaaaagagcacgaaatcatggatgtgattaagtgctctattatttaaacaaagttatttatgcagaataaaatggtaagaactgatcgaaggtttcttctaaaaatgcaataaatgctttgtcactttttaatcttttatcttgtggtgtgattgcacgcgctataaagaattcaccttttttcacattgatggctctttgtatcgcttcttttaaatcatcatccgttaaatctttaataaatggtttatcaggtttcatatgatctaagcaaacacgataatcatcaggtaattgttgaatagctttaaagtttctttcaaaaacttttgcacgtgttgctttatcttttgcttcatgcatgattccaaacataacaaacagttgatcttcaaacataccaatttggaaatgaggtaacattttatagcctcttttgtttgttgcaaaagcaacccatgtatctttaggaggattcacacttcttctagcatgctttgctacgtgaggataaaatgtttcaccagtttgacttgtaaagaagtcactaaaatattctcctaattcatggagttgtggtcgtatgtattcgtttaaagcttccattcgtgcgtctaagccttctacgttgaacgctttgaaatctttaggtttaaatgtatattttgtcatagagtacctcctgtatagtgtttaaaaatattgtagcatatgttttatcaattgcggcttaagacgctctcattaaaattagtattttcatttttatcataagaagttatttttataaaatgttgatgtataataaagatgttaggagatgatgttatggcactttatggatttgcccaaggacttattcaagaagcaggaattagaattaaacaattgatggagcaaaatttaacaattgaaacaaagtcaaatccgaatgaccttgttacaaatgtagataaagcaacagaagattttatttttgatacaattttagaaacatatcccaatcatcaagtattaggtgaagaagggcatggtcatgacatcgatacttccaaaggtacggtatgggttgttgacccaatagacggtacattgaattttgttcatcaacaagaaaatttcgcaatttcaattggtatttatatcgatggtaaaccttatgcaggttttgtatatgatgttatggctgatgtcttatatcatgctaaagtaggggaaggtgcatatcgtggtagccaacccttgaaaccattgaatgattctaatctaagacaaagcattattgggatcaatccgaactggttaactaaaccaattttaggagaaatctttaaagaaattgttaatgattctagaagtgcaagggcatatggtagtgcagcgcttgaaatcgtttcagttgctacaggtaatttagaagcatatatgacgccaagacttcaaccatgggattttgctggcggattggttattttatatgaagtaaatggacaagcttccaatttactaggagaaccattaacaattagtggtccaaattcaatcttagttggaaatcgtggtctccatcaagaaattagcaatgattatttagagccccaccatgatgcgttaatacaattacatgaacaacgatttaaaagaaaatcaaaataattaccaaaagcgtaatatgtagtcctaacaattaggtaacatattacgcttttataccttaaataataaaaacacgcgccaatataaaaccagttaaatgttcatcatgaacatgtgtggtcttaaatcaacgcgtgttattgtcgatataacttatagccaatcgttttctcgatattttttctttgtagtaaatccaattccaaaggttgcaacgagtaatataaatgttaaaatcatcattggtacatttgatgcaccaacagcaaaactaaataatactaagaaaacaacagctaatatagaaaatacccaaaagatatttttagattttttttgtttcatcctatccccaccttttgcttatcttttctcaattatatgatataataaaaaagttgtaattaaaagtgggattttacttaagaaagaaggaaactatttatatgactaataaaagagaagatgtccgcaatatagcaattattgctcacgttgaccatggtaaaacaactttagtagatgagttgttaaaacaatctggtatattcagagaaaatgaacatgtcgatgaacgtgcaatggactctaacgatatcgaaagagagcgtggaattacgattctagccaaaaatacggctgttgattataaaggtacacgtattaatattttggatacaccaggacatgcagactttggtggagaagtagaacgtattatgaaaatggttgatggggttgtcttagtagtagatgcgtatgaaggtacaatgcctcaaacacgttttgtacttaaaaaagcgctagaacaaaacctgaaacctgttgttgttgttaataaaattgataaaccatcagcacgtccagagggtgttgtagatgaagttttagatttatttattgaattagaagcaaacgatgaacaattagaattccctgttgtttatgcttcagcagtaaatggaacagctagcttagatcctgaaaaacaagatgataatttacaatcattatatgaaacaattattgattatgtaccagctccaattgataacagtgatgagccattacaattccaagtagcattgttggactacaatgattatgttggacgtattggtattggtcgtgtattcagaggtaaaatgcgtgtcggagataatgtatcactaattaaattagacggtacagtgaaaaacttccgtgtaactaaaatctttggttactttggattaaaacgtttagaaattgaagaagcacaagctggagatttaattgctgtttcaggtatggaagacattaatgttggtgaaactgtaacaccacatgaccatcaagaagcattgccagttctacgtattgatgagcctactcttgaaatgacatttaaagttaacaattctccatttgctggccgtgaaggtgactttgtaacagcgcgtcaaattcaagaacgtttaaatcaacaattagaaacagatgtatctttgaaagtttctaacacagattctccagatacatgggtagttgctggtcgcggtgaattgcatttatcaatccttattgaaaatatgcgtcgtgaaggttatgaattacaagtttcaaaaccacaagtaattattaaagaaatagatggtgtaatgtgtgaaccatttgaacgtgtgcaatgtgaagtgccacaagaaaatgcaggtgctgttattgaatcattaggtgcacgtaaaggtgaaatggttgatatgactacaactgataatggacttacacgtttaatctttaatgtaccggctcgtggtatgattggttatacgactgaatttatgtcaatgacaagaggttacggtattattaaccatacatttgaagaatttagaccacgtattaaagcacaaattggcggtcgtcgtaatggtgcattaatttcaatggatcaaggttctgcaagtacttatgccattttgggacttgaagatagaggtgtaaacttcatggaacctggtactgaagtttatgaaggtatgattgttggtgaacataatcgtgaaaatgatttaactgttaacatcactaaaacaaaacatcaaactaacgtacgttctgcaacgaaagaccaaacacaaacaatgaatagaccgcgtattctaacattggaagaagcgttacaattcattaatgatgatgaacttgttgaggttacaccagaaagcatacgtttaagaaagaaaattttaaacaaaaatgttcgtgaaaaagaagcaaagcgtatcaaacaaatgatgcaagaaaacgaataatttaacataataaaagagaagctgagcgatgaaagttgcttagcttctcttttggcatataatatttgaaaaagtgtttaaatgctattatttcctgttactttcacattttcaaatttctaacttgtttattcagatattaatcgagcggatagtgttgcgcacgttgtttaggtgtgtctaatcgacttttacaatcatcacacataaatgttcgaataggattgtttttaagtcgtttagactcagttgtgcgctcatctataaatacttttgcatcacagataatgcattgcacttgtctcaaattaaatcacctcaatatgagttacatggttgattcgatatgaataaccatcttcttgattgtaaataaaactatctacaccattatcgctgtaaagtcgtttaccgtcttttgcaaattggaaaaataaatagggtaatagatctatcggtatatctaaatgatcatgctcatttgataatcgaatagtagttgcagagtcatgtggttcggaatgtttgaaaaaaggtgtcatattaatgacaaatgaaccttctaacatggcacgttttttatattttatttctgaatttaaagtaggcggattagtttgtccttctaggatagcacgattccattcatgattatcttcaaagtcgattggttttgaaccatcaaatacacctttttctaaatcttcgatgctaacttttctatcatcgaaaatccaagtcgtactatctaatgttataggaaactttacggctcctttaatttgtatcattttcccactccctatcaatgtatatagcattattttaacacaaattgctaacgacacattttaaatctacttgctttttaatatttagtaagataaacttttagtaagacttgagaatttatatagagggggagcgtgtcatggcgaaacaagcaacaatgaaaaatgcagctttgaaacaattgactaaagatgctgatgaaatcttgcatctgattaaagttcaactagataatttaacattaccttcatgcccattatatgaagaagtactagatacacaaatgtttggacttcaaaaagaagttgattttgctgttaaattaggtttagttgaccgcgaagatggcaaacaaattatgttacgtcttgagaaagaactttcaaaattacatgaagcttttacacttgtttaaggtttaatatataagcatattaaaatggcgtgagatatcgacaattgagctgcgccgattttatatttatagtttaattactgattaaagtggctgttatgttgtcttcttgatgacatgtcagtcacttttattgggttttagcaattcacgatattaagtaaacaaatattctataaattacctcaagagacctgttaatatttgtgattatgactgtgtcatgtatataataagtaacatggatttttaaaattaaagtataaaacgaaatcatttgaagtataaattgtagaattggatgactgaatatatgaagaattttagaagtattttacggtatattggtaaaacctcaaagtttattgattatccgttattagttacatatattgtattgagtttaattggattagtgatggtatatagtgcaagtatggttccagcaactaaaggcacattgactggtggtatcgatgttccaggaacgtatttttacaaccgacaattagcatatgtcataatgagttttataattgtattttttattgcatttttaatgaatgttaaattactgagtaatattaaagtgcaaaaaggtatgattataactatcgtctcactattattactgacgttagtaataggtaaagatattaatggttctaaaagttggataaacttaggatttatgaacttacaggcatctgagttattaaaaattgcaatcatattatatatcccatttatgatcagtaaaaaaatgcctagagtattaagtaaaccaaaattaattttaagtcctattgtattagcattaggttgtacgtttttagttttcctacaaaaagacgtagggcaaacattactaatattaattattttagttgcgatcattttttattcaggaattggggtaaacaaagtcctaagatttggtataccagcagtactaggattcttagtagtatttgtcattgcattaatggctggttggttaccaagttatttaactgccagatttagtacgctaacagatccattccaattcgaatcaggaactggataccatatttccaattcattgcttgcgataggtaacggtggcgtatttggaaaaggattaggaaatagtgcaatgaaattgggctatttaccagaaccacatacagattttatttttgcaattatttgcgaagaattaggtttaatcggaggattgctagttattactttagagttctttattgtatatcgtgccttccagtttgcaaataaaacatcatcatatttttataaacttgtgtgtgttgggattgccacatactttggaagtcaaacgtttgtaaacattggcggtatttcggcaacaattccattaactggtgtgccattgccatttatcagctttggtggatcatcaatgattagtttaagtattgctatgggattacttctgattgtaggtaaacaaatcaaagtagaccagcaacgaaagaaacaacaacaaaaagttgatataagaagacaatttaattaaaaaaatactagccaatatttagtacgagatgacttctgtcattaagcaatgctaaacattggctatttatatactctttgtcaaattggactgatgagttcaataacggaagttaggcaaccaaacaacgcttaacttcctttttgttttgatattacgagattactcatgattatcaaattttataaacaaaacaacgtataattataactaaattttatgactaaaaattactaaatgtggtggcgaaattagaatcatgatgataagataaagttatcgctattgataataaatgttgatgttttgcaattttatttttaattttttagagttgtagaaatcgaaaatgtttcacaacaaaaacgtgaactacctgttgttgcatagtcatttttgaaattattatttctgaagcggaggttttaattgtctcaagaatgttaaattttgaaaatttgaaacataactatagcaaaacagagcgctttaagataaaattttattatctaattagttagaaaattctaatagtttgaggagtgtatcgctattgaaacaaataaaaaagttacttgttgctaaccgtggagaaattgcaattcgtatattcagagcggcggcagaattagacatcagcacagttgcaatttattcgaatgaagacaaaagttcattacatagatataaagcagatgaatcctatttagttggaagtgatttaggtcctgctgaaagttatttaaatattgagcgtatcattgatgtagcaaaacaagcgaatgtggatgcgattcatcctggctatggatttttaagtgaaaatgaacaatttgcgcgtcgttgtgcagaagaaggaattaaatttattggtcctcatttagaacatttagatatgtttggagataaagttaaagctcgtacaacggctatcaaggcagatttaccagttattcctggtacagacggtccaattaaatcatatgaattagcaaaagaatttgcagaagaagctggtttcccgctaatgattaaggccacaagtggtggcggcggtaaaggtatgagaatcgttcgtgaagaaagtgaattagaagatgctttccatagagcaaaatcagaagctgaaaaatcatttggtaatagtgaagtttacatagagagatacattgataatccaaagcatattgaagtacaagttataggtgacgaatatggaaatatcgtacacttatttgaacgtgattgttcagtacaacgtcgtcatcaaaaagttgtagaagttgcaccatcagttggattatcaccaacattacgtcaacgtatttgtgatgctgcaattcaattgatggaaaatattaaatatgtcaatgcaggtactgttgaatttctagtatctggtgacgaattcttctttatagaagttaaccctcgtgtacaagttgagcatacaattacagagatggtaacaggaattgatattgttaagacacaaattttagttgcagcaggtgccgatttatttggtgaagaaattaatatgccgcaacaaaaagatattacaacattgggctatgccatccaatgtcgtattacaacagaagatccgttaaatgatttcatgccggatactggaacaatcattgcttatcgttcaagcggtggctttggtgtacgtctcgatgctggagatggtttccaaggtgctgagatatcaccttattatgattcattactcgtaaaattatctacacacgcgatatcatttaaacaagcagaagaaaaaatggtacgttcattacgagaaatgcgtattcgtggtgttaaaactaatattccattcttaattaatgtaatgaagaataaaaagttcacaagtggtgattacacaactaaatttattgaagaaacaccagaacttttcgacattcagccgtctctagatagaggtactaaaacattagaatatataggtaatgtaacaattaatggtttcccaaatgttgagaaacgtccgaaaccagactatgaattagcatcaattccaactgtatcttcaagtaaaatcgcttcatttagtggtacgaaacaattgcttgatgaagtaggtccaaaaggtgtagctgaatgggttaaaaagcaggatgatgttttactaacagatacaacctttagagatgcacaccaatcattattagctacacgagttagaactaaggatatgattaatatcgcatccaaaacagcggacgtatttaaagatggtttctcacttgaaatgtggggcggtgctacatttgatgtggcatataatttcttgaaggaaaacccatgggaacgacttgaacgtctacgtaaagctattccaaatgtattattccaaatgttgttacgtgcttcaaacgcagttggttataaaaactatcctgataatgttattcataaattcgtacaagaaagtgctaaagcaggcatagatgtctttagaattttcgattctttaaactgggtagatcaaatgaaagttgccaatgaagcagtacaagaagcgggcaaaatctctgaaggtactatttgttatacaggtgacattttaaatcctgagcgatcaaacatttatactttagagtattatgtcaaactagctaaagagttagaacgtgaaggtttccatattttagcgattaaagatatggcaggcttattaaaacctaaagccgcttacgaattgattggtgagttaaaatcagctgtagatttaccaattcatcttcacactcatgatacaagtggtaatggtttattaacatacaaacaagcaatagatgctggtgtcgatatcattgatactgctgttgcttcaatgagtggtttaacaagtcagccaagcgccaattcgttatattatgcattaaatggcttcccacgccaccttagaactgatattgaaggtatggagtcacttagtcattattggtcaactgtacgtacttattattcagactttgaaagtgatatcaaatcaccgaatactgaaatttatcaacatgaaatgcctggtggacagtattcgaatttaagtcaacaagctaaaagtttaggtttaggcgaaagatttgatgaagtcaaagatatgtatcgcagagtgaatttcttatttggtgatatcgtaaaagtaactccatcgtctaaagtagttggtgatatggcactttatatggtacaaaatgatcttgatgaacaatccgtgattacagatggctataaattagatttcccagaatcagtagtgtcgttcttcaaaggcgaaataggacaacctgtaaatggttttaataaagatttacaagcggttattttaaaaggccaagaagcactaacagctcgtccaggtgaatatctagagccagttgattttgaaaaagtccgtgagttgcttgaagaagagcaacaaggtcctgttacggagcaagatattattagttatgtattatatccaaaagtatatgaacaatatattcaaactagaaatcaatacggaaacttatcgttacttgatacgcctacattcttctttggaatgcgtaatggtgaaacagtagaaatcgaaatcgataagggtaaacgattaattattaaactagaaacgattagtgaaccagatgaaaatggtaatagaacgatttactatgcgatgaatggtcaagcgagacgtatttacattaaagatgagaatgtgcatacaaatgcgaacgttaagccaaaagcagataagagtaatccaagtcatatcggtgcgcaaatgccaggttcagtaactgaagtcaaggttagtgtaggtgaatctgtgaaagctaaccagccgttgctaattactgaagctatgaaaatggaaacaacaattcaagcaccatttgacggtgtgattaaacaagtaactgtaaataatggtgacacaatagcgacaggcgatttattaatcgaaattgaaaaagcaactgactaaaatgattaaaataaaacgagattacacaacaattgacgtgtaatctcgtttttacatggcttaggtttaattttaaatattgatataaaaaaccgtaattttaatgggcgtgccattaaaattacggtttgcttttttgttattgcttgtcacttcttactgatcgtaacattagcatgataaagtatgttgtcataccaaataaataagtgataaataatgcatggaaaagtgcgattagcaggttaacatttgtcataatagataatgcacctgtgataacttgtaatataacaagtataaatgcagctgtataaccataatgaacagtacggttatttggataatttttaacagcgtgaatataagtaatcataataatcgtaaacactataaaagccatgatacgatgcgtgagttgaacccaatcttgttctgaatgtggtacaagatcgtggaatggcaatggccaaccaccatatgctaaacttgcatccgcatgtctcactagtgcaccagtataaacaccacaataaatgatgattgccattaaccatgttaaacgtcttaatggctttttgatatataattcgtcagcttcatatttttgatctatagagaaaataatcaatgttattaaaaatacagatgagaaactgattaatgatataccaaagtgcaatgctaaaacgtaatcgttttgttgccaaataacagcagcagctccgattaatgcttgcaataataagaatccaacactaatgattgataaaggtttaatttctttaatatagcctatatgtttccatgcagtgataactaaccataagaccattaataaagacaaagctgaaacggctctatgacttaactcaataatcgtatcaataggaaagaattctggaatcaacgcaccatgacatagtggccaagaagaaccacaaccatcagctgatccggttttggtaactaaggctccaccaagttgtacaaatgtcatcattaacgttgctacgacacctaaccattttaaattctttttgccaaacaatttatacaccccatcataaaaaaacgcatcactgagaattagaattaatagccggatttgagatgatactataaattgacctgattgtaggatatgaaaagatgggatccaacgcaggaaatatgatttaattttacaagtattgtatgtggacgacataaaaagaacttaatcgtaatgatttttttattgggataattatgtaatccacgtttactcaaatttgaagcttaaatattaatctcttttagatgcatgattctacttattaaaattttctaacatatacattatagcaataaattaaatgttatttgtgtcacaaaattgacattttctattgtcgttaatttgtcacaatttaattttattaaacctagtctttttatgcaatctaagatatcataatcttatatgaacaaatttaaggagggggattatgagcaaagagcatactttgtcacaaaatattagcagagttaacttcaaagaattgcaacagataattaaaatgggacttgttcaaggtaacttaattccggcttttgcgggcgcatggctagcagttgtaatgacaaatcattccttcttatcatcaatacctcaaattttattaatgctattaggatctactttaattatgggtggcgcatgtgcgttaaataattattacgaccaagatattgatcgtattatgcctagtaaacaaaatagaccaactgtaaataatagaattacagatcaaaatttattattattaagttttggtatgatgttagttggagaaatttgtttgtttttattgaatataccatcaggcgtacttggtcttatggggattgtaggttatgtgtcttattactcaatatggtctaaaagacatacaacatggaacacagtgattgggagttttcctggagcagtaccaccactaattggatgggttgcaattgaaggacaaattagtttaacagcgattgcgctgtttttagttgtattttgttggcaaccaattcatttttatgccttagctattaaacgtaaagatgaatatgcacttgcaaatattccaatgttaccatcagttaaaggctttaaacgtacacgtgtcagtatgtttatctggttgattattttattgccagtacctttattactaataaatttaggtgtcgtattcgtagtgttagctacattattaaatttaggatggattgcattaggtttaacaacatttaagaaaaattcagatcaaacaaaatgggcaacacaaatgtttatatattcactaaattatttagtgatctttttcgtgttagctgtgattgtttcattacttactttgatctagattaattaagttaggatgaaaaatatgggcgttccaattttaccaacgattagtacgacatgtattgtcattagtgcaattttaattgccattggttggagacttatttggaaaagggaaataaataaacacaaaaatgttatgttagctgcagctgtttttgctttaacttttttcttaatctatgcaagtagaacgattttcatcggtaatacagcatttggcggaccagcatcaattaagaaatattatacgattttcttatttttccacattaatttagcaacaattggtggtattctaggcctagttcaaattattactgcatttaaagataaatataatgtacaccgcaaattcgggccattcgcttcagttatatggttctgtactgcaattacaggtgtagcagtttacttattattatatgtattatatccaggtggagaaacgacatcactgattaaagcaacatttggtcattaatatgcttatacaaatgatactaatctgataaggcaatttgttttatcaggttttttgatgaagaatagtcggacagttgatggtattcatttgataccttaactgtccatttttttatacatattttaatcctaataatgaaattcaacctgaaaacataaagataggttatgatatagagtgtagggaaaatctttatgacgttaaaattatgcctgaagatgattttgtttcatcgaaacgacacagttatgtcagtgttgaaaatttgctaattaatgtgttgttttttacaatagtattaatactttttaggtggttgattgatgaaaaagttaattataagagtcgtcggtgtattatttttagttggatttttaatatatcttttttattcaccgagattaaaatttgatgtattagagaacccgaataaaggtaataaagtaaatagatctgaacaggtgaataaatcaaataaccatgctgaaaatccaaagcctaaagaaggtgttggtacatgggtaggtaaagatattaaagtgcttacttctaaatttggacaagcagatcgtgtctacccttttagagatggttacaaaaattatgtgtttaaagacaaaaacagttattacattgtttcaactaaacgtgaagaaatcgtttcagtgtatgctacaggtgagaaagtcaatgttagtccgttaaaaataggacaacattctgcagaaatttttaatcatacaagtattaatccagaaccgtcctttaaagttgatggtaaaaaatatgaatttgaactttcagatgaagatttaaaaacacaaacactgattaaatatggcgacatatatgcacaagtgtattctgatcaacaatcgaaaaaggtgctaagtgtacgatttttaacaaaagaaatgttagcagatattgaaccttatcaattaaattctaattctacgtcagaagagcataataagcgtccagttgagcaaaatccaaatcaattaatttctctttatgaagtaacgaatgaaatgagaaaattaaaaggattaaaaccattgaaaatcaatagcgatttagcacatattgcatctaataacttatatgaagcgacctctaatggttctgatagtgttgaatttacagaggacgcattaagagggcaattagataaaaatcacgttacttataaaacaactgctcaaaatgttggttatgcgtttaatgatgtaccaacattaatccatagttggatgaattcagatatacatcgatctcgtctattaaattcaaaatacgatgagatgggtggagatgtaatgagagattattattcactaattttcttagaaaaataacaatgaggggtatttatgattaatgaagcttcactagcgatattagatgatattgatgaactagctgatatgatagttgcatcagatatttatgcatcatttgagcaagctaaacaggcgctcgaaaacaatgacgaagcacatttactttatcaatcatttttaaaatcaaaagagaaatatgatgaagtaatgcgtttcgggaaatatcatcctgattataagaaagtcatgttagagacaagacaacgcaaaagagcatatgagatgcttgacgttgtgatgcattacaaagctagggaaatggcacttcaacatttaattgatgaagttgttacgaaaattgcgtacgctgtttcagagcatgtcaaaatagaaacaggtaatccattctttcaaacatcacatagtggttgtgcgacgggcggatcctgtaattgttcattataaaaaacatcgagtcagaaaaaggtggttattgaaaccactaactagcatctgactcgatgtttttatttattcgggattgtttgtttgaattgttgtgctaaatctggtcgatctgtcacaatcgtgtgtgcacctttttggtataaatcattcatcagatctatactatttacgccataatagcctggaatgatattcatatcatttaaccatttgataaaacgagatgaagtcaaatcaatgcctttaaaatgagtaggcatttggaacgtttgtgctaatggttggtagtatctaccacctaataaatgatattttaaaaatgcttctgtaacttcctgttggctagcaccaattgcgacggatccttgtgcaattttattaaaacgaacgatttgttctttataaaaacttgtcacaagaacgcggtcaaatgcttgattttctgcaattgtatcaaacataatttgtggtgcgattgagccttcataggattcaggagcatcttttaagtctacgtttatatacatatcaggatattgcttcagcaactcatcgaaggttagtatagctgtgtgtgcatgaccacgatatggtgttagtccattgatatctttgaagtgataagctgcgtctaatttctttaattctgctaatgtatgggcactaacttttccagagccgttcgtcgttctatcaacagttgcgtcatgaaaaacgataagctgttgatcttttgtgagtctcacatccgtttcaaagccatcaacgcctaattgtttagcatagtcaaatgcaagttgcgtttgctctggtcttaaagccataccaccgcgatgcgcaaatatatatggtgcattgcctttgaaaaaagcagggatggtttgctttttagtactcactttatttttattgatcattaatagactacttacaaatccagcaccgactagtaccgcatttaaaatgtttctgtttacttttttcatagaaaattcctcctcgtttacttttatagcttaacaaaatcatagttctgactacagtgaaatgtgtggttaatcaaatagtgatgctcttgagaattgaattaatataatgatgtttaatataatctaaatacatttatcgagcaattacacaagacatatttaaggtagcttaatattttaaaattaataaagacatgatatgattaatgctgaaaataaatggagtgaggtttaaatgaatttaatcccaagaactagtattgtagtttatttaaaacatatgaaacatgaacgacaaatccgaaaatatggacatatcgttcattcaaatagagatcgtaaatttgtaattatgtatgtgaatgagcaagatgttgatcaaattgtacataaactaatgcaacttaaatacgttagacacattgatggctcaccatataaatacttaaagaaaacttacgaaaaagagaaacacgaaatatataattaatattattgaagttctggtatccatttttggagccttaacacactaattaaataattataatataacgataaatcatgaaatgcttgagggggctgtacatcgatacctaaaattggtatgtcgaatttttcagcacaatcattaatcatttgaaactttttatttgaatctggatatggatatttaatagcgttaatcatgatataaaatgcttggaaatgattgccagttgtagggttcataatgattgctacagatgactttttattttcagcttgtggtgaatgaaaatagataattttatcaatacgttgatggttatattcaatcatcgtcatgaattcgaacaaatctgttagaccttcaccaagtgtaataaatgtttgtttcattggtttatcattctcctttttctcaataaattatattaaataactaaatgaattggaagtgtgaacaacatgcgcgtcattgcaggtaaacataaaagtaaagctttagaaagtatggaaggccgtaatacgagaccaactatggataaagttaaagaaggtatctttaatagtttatatgatgtgtcaggtataggtttagatttatttgcaggaagtggggcgcttggaatagaagcactctctcgaggtatggataaggtaatctttgttgatcaaaattttaaagctgtaaaagttattaaatcaaatcttgcgaatttggatttagaggcacaatctgaagtttataaaaataatgcagatagagctttaaaagcattgtcaaaacgggatattcaatttgatgtcattttcttagatccaccttataataaaggtctcattgataaagctttaaaactaatttcagagtttaatttattgaaagaaaatggtatcatcgtttgtgaatttagcaatcatgaagaaatagactatcaaccgtttaatatgattaaacgttaccattatgggttgacagacacattgttattagaaaagggagaatagtatggaacatacaatagcggtcattccgggtagttttgaccccattacttatggtcatttagacattattgagagaagtacagatagatttgatgaaattcatgtctgtgttcttaaaaatagtaaaaaagaaggtacgtttagtttagaagagcgtatggatttaattgaacaatctgttaaacatttacctaatgtcaaggttcatcaatttagtggtttactagtcgattattgtgaacaagtaggagctaaaacaatcatacgtggtttaagagcagtcagtgattttgaatatgaattacgcttaacttcaatgaataaaaagttgaacaatgaaattgaaacgttatatatgatgtctagtactaattattcatttataagttcaagtattgttaaagaagttgcagcttatcgagcagatatttctgaattcgttccaccttatgttgaaaaggcattgaagaagaaatttaagtaataaaaataacagtattttaggtttatcatggtttacaatcctaaaatactgttttcatttgttaacgatattgctgtatgacaggcgtgttgaaatctgtttgttgttgcccgcttattgcattgtatatgtgtgttgctttgatttcatttgtgaagtaatgtgcattgcttttgttaatattggttatatattgtctttctgggaacgctgtttttaaatgctttaaatattgtctgccacggtcgttcatcgctaatactttaactgcgtgaatgttactcgtaacatctgtaggtttaatgtttaataatacattcattaacagtctttggatatgcgtatatgtataacgctttgtttttagtaattttacaaaatgatgaaaatcagttgcttcataaatgttagatttcaaacgattttcaaaaccttcagtaacagtataaatattttttaatgaatctgtagtcatagctatgatttgatatttcaaatatggaaatatttgatttaatgttatatgaggtgttacgtacaagtgttgaatatctttaggtaccacatgatgccaatgatcatcttgactaatgattgatgttctaatagatgtaccacttgcaaactgatggtgttgaattaatgaatcatgatgttgagcattttctcgtttgatagaaattgcattgatgtttttagcatttttagcaattgctttcaggtaactaataccaagtatgttgttaggacttgctagtgcttcatgatgctctaataattcgctaatgatacgagggtagcttttaccttcttttactttttgtgaaaaggattcagattgttcaatttcattaatgctgtgtgctaattgctttaatgttttgatatcattattttcactaccaaatgcaattgtatcgacactcatataatctgcgactttaactgctagttcggcaaaatgatcgccagatgataaactggcagttgctggtagttcgataactaaatcagctgttgataacgccatttttgcacgagtaaacttattatagattgctggttcgccacgcatgacaaagttaccactcattattgcaatagtaacgtcagcatttgtaagttttttagattgattaatatgatattgatgcccattatgaaagggattatattctgtgattaagccaacgcttttcatttgcaattcgtcctttcggtattcattattaatattgtaacagaacatgatatgttaagaaaaaatcttgacaacttgttcttagaaagttaaaataaattttgtgcttgttagaggtgaagccatatgaaatggtcaattacgcaattaaggaaatatcaaggtaagccatttgaatttgatcaaacggtgagttttgacaatttaaaagaatcattagatttaattgatttatctccaattacaatccaaggtcagttaaccattaagtcaacagaagtcgttgcggatattcacattactggaacgtatacaatgccttgtgcacgtactcttgtaccagtaaaagtcccactagatgtaactactacagaagtatttgatttagaagggtacaatcagtataacgatgatcaagatgatgtagatgaacactatcacattattaaagatggtatggttaatcttcaggatattgtcgaggatatagttattattgagaaaccaatgagagcttattcagagcaaagtgaccaaatgttgacagtaggtaatggttgggaagtaatcgatgaggatcaattagatgagcttgctaaacagcaagaacaagatgattcagaatcacgacaagttgatccaaggcttcaaaaattacaacaattatatgataaagagcaataagtagtttaattaatgatataatgttgttaattaaactaacatttagtatttttcgtttataatctaaggaggatatatcatggcagtaccaaaaagaagaacttctaaaactagaaaaaacaaacgtcgtacgcatttcaaaatttcagtaccaggtatgactgaatgcccaaactgtggcgaatacaaattatcacaccgtgtatgtaaaaactgtggttcttacaatggcgaagaagtagcagctaaataattttagttactcaatataaaaagtcccgcttaaaatgattgttttaagtgggactttttatattgcgaaaaataattggcgaacgaggtaactggatacctcatccgccaattaaaatttgttaatttaataattaaatataaagacgatttattagtttttacgttttctaggtaatacgaatgcaacgatgctacttaaagctaataatgccattaatggtaatgtcatatctttatttgattcttcaccagtttgtggtaatgattttgctttattttcttgtgtatttttattgttttggctttgagtgtgtccatcatttgtgtttttaatgtttgctttttgtaatggagcactatcttttgcttcgctagaacctgctgaagtttgaacaacatcttttgttgtttttgatgaagcagttgttggttttgcaacattttgagtcgtagatactaccttagttggagttgtactacttgattctacttcacctttagttggttttgtagcaggcgttttgtctttacctgactcactagatgcgtcattttctttttcaacacttggtaattgtttattgtcatctttttggctgtcttgtttttgtgattctttttcaacaggtgatggtgttggtttgctaggcgtagctggagtagcttccttcttagctgagttatcttgttgttcttttttgttagatttatcggtattggcttttgtaaatgcttctttatcaacgattctgacatggtattgtccatcataatcaatcgtttttacgtgaactttaacgatagcatcatatagagttttaccttcaacatatgggaaaataattgttctagtattatttttagcatctttgcttatagttctaacacgttgaccttcaaccatgaaatctttccagtaatcgtcattagtagtttccatgaccatatattttttgccgttaagcatacctgttttaatagggtgtttaacaaaagtatccatcatagattcgttattctcaacactttcataaacaacatattttgtatcttgtaaatcagtcattttttcatttgttggttgtactttttggaattcagtaatagctgatttcacttgctcatctaaagctttctttgtatcctctaatttcttcttgtactcagcctttaatttttcaggaagtttatcttgaattttatttaattcataaacttgtctttctagtgttttcgcttttttatatggcgctaataatttttcagctttataatcttcttcagttttgaatttatctgcactgttataaattggttgtgcgaattccattaatgtgtaatcgtatttttcttctttgttattgaagtgtgttgaactaacaattttaacagcttttgttccgtttgatacagagaagcgaatgtaagcataatctttaacagtatcgtatgatactaatttaattggcaactttttgtcaccttcataaacttcaaattttctccaaaattgacctgattgtaatcctaattcaatttctggttttgaatcagtgaaaataactctagcaggtttaacagaacttgcataatgataaaactgttgagttccatctttctttttcatttcaaaatcaattggacgagagtttggtgcgctatgatctttgtcttttattgcagggtttttaatcgcttctctaagttcctgattcaaaataggatatgtattgttagtggcttttgctgctggtttaacttcttttgtttccttaggggctttaacttctttaacttctttagcttcttttgtttcagaagtaggagcctcaacttctttattagatactgagacagcattagctactggtttagtttctggagctttttcagatgttgttgttggacttgcaactgcttcagtttttggttgtgcttctgtatttgtaccacctgtttcttcagctgctgcttgtgcttcgccatttgacattaataataaaagtgtactaattgctacagatgcaacgcctagtgatgactttctaattgaataaaatgatttaaattctttttgctgtttgttcatgttgtaaaaacaactcctaattgtatattatcaactgataatcattatcaattgattacttgtattgtacattgaaatggtagttaattgcaacgttattttataaaaaaataacctatgttatagattatgaaatatctatgacataggttaaataaaatttaaaataaaaaatatattaagttatgagtgtgacgatgatttatttagattcttttcttttgaaaagtaataaagataatgaacctaaaagggcaagtgttgcgaaggcaactgtgctaataaagttatcaactgaagttaaaccagtttttggtaattctttagctttagatgcttgtttaggcgtttcgttatgttttgtaactttgttagtttgttgtgatttattatcacttacagcttgattgttgctttcagatttcgctgttgcaacatctttaacaggtgtttgaactttattttgttcttgagcagtttgtgctgttttaactgtatgagcagtttgtgttttagtttgatcttttgttgtgtcagtacttacaactttagtagagtgattgtcttcaactttgcttgttgtagttacagtaggtttaactttttcaactttaggttgaactggtttagtttgctcagtaggtgttttaggttgagctggttttggttgaaccggtttaacattgtttggttttgctgcgtcagctaatgtaggaattgctttttcaaattccaaatgcgtagtatatctatgattgtaattaatttgtggcacgacaatatgtactttagtagttaagctcttatatccaggttcaactgcaacattgattgttctagtatccgcttttttattatcgttaacaacagttgttgctaattcttgattgtttgcattgtaaaatttgtattctttccagaatgatgcattgtttaacacggtttggaaataatatttattattttgtttaattactttaccagggtgttgcatatagtcatccatgtgtgacttctctgaagagccatctttttgcacttggaaattaattggttgtgatgttgcttgagaaacttgtgtgctttgattattagttgcgttcgtagcttctgttgccgcattgacttgttggctgtctgcgcctatgtatacaagggaacctaaaatgatagatgctgtacccattgtaatctttttcatagctgatgaacgttgttctgattgatacttactgtttaaataatgttttgtcatgttgttttcctcctaaggatacaaattatgtgttgttatatgagatgattaaccattgcaattgataatggttatcaattatactagcacatctattttcgtataacaataataaattgattataaaataaatattgacaatgataatcattattatttatgattttactaaagacttaaaagcaatcataaaaaggaggattatgttttgaaaaatattttaaaagtttttaatacaacgattttagcgttaattatcatcatcgcgacattcagtaattctgcaaatgccgcagatagcggtactttgaattatgaggtttacaaatacaataccaatgacacgtcaattgctaatgactattttaataaaccggcaaagtacattaagaaaaatggtaaattgtatgttcaaataactgtcaaccacagtcattggattactggaatgagtatcgaaggacataaagaaaatattattagtaaaaacactgccaaagatgaacgcacttctgaatttgaagtaagtaagttgaacggtaaaatagatggaaaaattgacgtttatatcgatgaaaaagtaaatggaaagccattcaaatatgaccatcattacaacattacatataaatttaatggaccaactgatgtagcaggtgctaatgcaccaggtaaagatgataaaaattctgcttcaggtagtgacaaaggatctgatggaacgactactggtcaaagtgaatctaatagttcgaataaagacaaagtagaaaatccacaaacaaatgctggtacacctgcatatatatatgcaataccagttgcatccttagcattattaatcgcaatcacattgtttgttagaaaaaaatctaaaggcaatgtggaataatgagaaatgttaaacaaattgctacaaaatctattatagctattattagcttaggtatacttacatatacaacaatgattggtagcgtgttggctgatgagataaaatatccatcagccaaatttaatcaacctgaagcaaaagataaaacagaattaactacatcaatttttgatgaaaagataaaagagaataaagcgttagagttactaatttttaatcaagaaaataaaaatgtaactgaggaacaacaactagttgacgaaaaggcgcaattgatttcagatatgactggtaaaatttacttgcaagtaaagctaaaaggtcaaatagataaagaacaacttgtttttcaaaatgacaaaaatgaagaatttccttttgttataaaagatgaaaaggatgacacaatagtaagaattttaattgaacagcatatggataaaatcaatatgcatgttaaaacgttggctgaaaagaaaaatctagataacaaagaaatggtgtattctattcattttaaagagaaaaaagtacaacatgatgatgcaaaagaagtgccttcaaaacatcaaaatcaagaaaataatcaagatcagcttaaaaaagatattgatgacaaaaaagatagtcaaaaatcagatactaaggaaagacgtactagcctttttactgaaaaaggattaaatgatattcctgtacaaaaagataaagtgcaacaagacagtaataaaaagattgaaaatgagcgacctaaagcatcaggtacattaaaagttgaaaatagccctccaacagtaaaaaaggttgaaaataatcacaaagagcaaccgaaacataaagatgaaaaatcaaaaaaggaaaagaaaaaagtagttgaaaaagaaaaagcgttaccagcttttaatagagatgatgatagcaagaatagtagtcaattatctagtgatattaaagaacttgatgaaccaaatcataaaaagcaatatattttatttgcagctggcattgtgttagcaactattttacttatttcggcacatttatacagcagaaagagaggtaaccaagtttgagaatcataaagtatttaaccattttagtgataagcgtcgttatcttaaccagctgtcaatcttccagttctcaagaatcaactaaatccggcgaattcagaatcgtaccaacaactgttgcattgacaatgacattggacaaattggatttaccaattgtcggcaaacccacgtcatataagacattgcctaatcgttataaagatgtaccggaaattggtcaaccaatggagccgaatgttgaagctgttaaaaaattaaaaccaacacatgttttgagtgtgtcaacgattaaagatgaaatgcaaccattttacaaacaattaaatatgaaaggctacttttatgattttgatagtttaaaagggatgcaaaagtcgattacacaattaggtgatcaatttaatcgtaaagcacaagcaaaagaattaaatgaccatttaaattctgtaaagcaaaaaattgaaaataaagcagctaaacaaaagaaacatcccaaagtattaatattaatgggtgtaccgggtagctatttagtagcaactgataaatcatatattggtgatttagttaaaatagcaggtggagaaaatgttattaaagtgaaagatcgtcaatatatttcgtctaatactgaaaatttgttgaatatcaatccagatattattttaagattaccacacggaatgcctgaagaagttaagaaaatgtttcaaaaagaatttaaacagaatgatatttggaaacattttaaagctgtgaaaaataatcatgtttatgacttagaggaagtgccattcggtattacagcaaatgttgatgctgataaggcaatgactcaattatatgatttattttataaggataaaaaatagtgagttgatatgatgataaaaaataaaaagaaactactatttttatgtttgttagtcattttaatcgcaactgcttatatttcgtttgtaaccggtacaattaaattgtcatttaatgacctaattacaaaatttacaactggtaacaatgaagcagtggattcaatcattgatttgcgattgccacgtatattaattgcattgatggttggcgcaatgttagcagtttctggagcattattacaagcagcactacaaaatcctttggcagaggcgaatatcattggcgtttcctcaggtgcacttataatgagagcactttgtatgttgtttattccacaattgtacttttacttaccattattaagttttattggaggtttaataccatttttaataattatattgttgcattctaaatttagattcaatgctgtaagtatgatattagtaggtgttgcgttattcgtattattaaatggtgttttagaaattttaactcaaaaccctttaatgaaaattcctcaaggcttaacaatgaaaatatggagcgacgtatacatattagcagtatcagcattattgggattaatattaacattactattgtcccctaaattgaatttactaaatttagacgacatacaagcgcgaagtatcggttttaatattgatcgttacagatggttaacaggtttattagcagtatttttagcaagtgcaactgttgcgattgttggacaactagcctttttaggtattattgtgccacatgtggttagaaagctagttgggggcaattacagagtacttattccgttttctacagttattggtgcatggctattgttagtggctgatttattaggacgagtgatacagcctcctctagaaattccagccaatgctattttaatgattgtcggtggtccaatgctaatttacttaatttgtcaaagtcaacgaaatcgaatctaaaacggtacaacaactggtttagtgatgactgaagaaacgtcgttaataaaagaggatttttatgagaatgaagcgatttttaactattgtacaaattttattggttgtaattattatcatttttggttacaaaattgttcaaacatatattgaagacaagcaagaacgcgcaaattatgagaaattacaacaaaaatttcaaatgctgatgagcaaacatcaagcacatgtgagaccacaatttgaatcacttgaaaaaataaataaagacattgttggatggataaaattatcaggaacatcattaaattatccagtactacaaggtaagacaaatcacgattatttaaatttagattttgagcgagaacatcgacgtaaaggtagtatttttatggattttagaaatgaattgaagaatttaaatcataatactattttatacgggcaccatgtcggtgataatacgatgtttgatgtgttagaagattatttaaagcaatcgttttatgaaaaacacaagataattgaatttgacaataaatatggtaaatatcaattgcaagtatttagtgcatataaaactactactaaagataattacatacgtacagattttgaaaatgatcaagattatcaacaatttttagatgaaacaaaacgtaaatctgtaattaattcagatgttaatgtaacggtaaaagatagaataatgactttatcaacgtgcgaagatgcatatagtgaaacaacgaaaagaattgttgttgtcgcaaaaataattaaggtaagttaaacagaaaagaggataattatgaaatttatggcagaaaataggctgacgttaacaaaaggaacagcaaaagatattatagaacgattttacacgagacatgggattgaaacattagaaggctttgatggcatgtttgttacacaaactttagaacaggaagattttgatgaagtgaaaattttaacagtttggaaatcaaagcaagcttttacggattggttaaaatctgatgtctttaaagcagcacataaacatgttagaagtaaaaatgaagatgaaagtagcccgattatcaataacaaagtaattacatatgatataggctatagttacatgaaataattgaatttaaagaggttgcagtacttgttatgacaattggtattgttaacttttgtaacgaccatacatgataccgatgatggtcgtttttttaatgaacacaaacatgctaacaacaaattgctaaaacatagtttgatttgaatgtgctttgaaaataatcatcaattatatcattttgatttattttgaagaagaaaagaattaataatgatattttggggcgtatgatttatagtagtagtatcgataaaagaaatttatacaatttgaaataatatgagtgataaaatcgattaattaatattaactatacaatcaaatgttttcatcttattaatgattaatatttttatttttaaaaataaagcgaggagctatctatggaacaaattacttctgcacaaaataatagaattaaacaagcgaacaagctaaaaaagaaacgtgagagggataaaactggattagctttaattgaaggtgtgcatttaattgaagaagcttatcaaagtggaattgtaattacacaattatttgcaattgaaccggcaagattagatcagcaaattatcgcatacgcgcaagaagtttttgaaataaacatgaaagttgctgaatctttatcaggtacagtgacaccacaagggtttttcgcaatcattgagaagccgcactatgatatttctaaagcacaacaagtattgctcatcgatcgtgttcaagatcctggaaatttaggcacattaattagaactgcggatgctgctggaatggatgctgtaataatggagaagggtacgacagatccttatcaagataaagtgttgcgagcgagtcaaggtagtgttttccatttgccagttatgacacaagatctcgatacgtttattactcaatttaatggtcctgtttatggtacagcacttgaaaacgcagtggcatacaaagaagttacttcaagtgattcttttgcattactattaggtaatgagggagaaggtgttaatcctgaattattagcacatactacacaaaatttaatcatacctatttatggtaaagctgaaagtttaaatgtagcgattgcaggtagtattttactttatcatttgaaaggttgaccgtgttgaaagttttccgatataattataattaattgtttaacagaacatttctacgtgattgcatacacaattgaatataaaccaataaaaaggcatggacatttatataaataattgttttagggagaataatcgtgactgcaagttattccaattatttaaagtcttttcacctttttggttacttaaagagatttaagtcggaaagacaatccgttatcaatattaaacaagtgtatgcttaggcataaatttgggtggtaccacggaaatgactttcgtcccttattttttaagaggatgaaagtctttttttagttaaacaacaaatatgataaatataaaatgaatagttcgaatagggaggtcagtgacatatgtctgaacaacaaacaatgtcagagttaaaacaacaagcgcttgtagatattaatgaagcaaatgatgaacgtgcactgcaagaagttaaagtgaaatacttaggtaaaaaagggtcagttagcggactaatgaaattgatgaaggatttgccgaatgaagagaaacctgcatttggtcaaaaagtgaatgaattgcgtcaaacaattcaaaatgaattagatgaaagacaacagatgttagttaaagaaaaattaaataagcaattggctgaagaaacaattgatgtatcattaccaggtcgtcatattgaaatcggttcaaagcatccattaacacgtacaatagaagaaattgaagacttattcttaggtttaggttatgaaattgtgaatggatatgaagttgaacaagatcattataacttcgaaatgctgaatttacctaaatcacaccctgcacgtgatatgcaagatagtttctatattacggatgaaattttattacgtacgcatacatcaccagtgcaggcacgtacgatggaatcacgtcatggtcaaggtccagttaaaattatttgccctggtaaagtgtatcgtcgtgactctgatgatgcgacacatagtcatcaatttacacaaatcgaaggattagttgttgataaaaacgttaaaatgagtgatttgaaaggtactttagaattgttagctaagaaattatttggtgctgatcgtgaaattcgtttacgtccaagttacttcccattcactgaaccttctgtagaagttgatgtgtcatgttttaaatgtaaaggaaaaggttgtaatgtgtgtaaacacacaggatggattgaaattttaggtgctggaatggtacatcctaatgtattagaaatggctggttttgattcttcagagtactctggatttgcatttggtatgggaccagaccgtattgcaatgttgaaatatggtatagaagatattcgtcatttctatactaatgatgtgagatttttagatcaatttaaagcggtagaagatagaggtgacatgtaatgttgatatcaaatgaatggttgaaagaatatgtaacaatcgatgattctgtaagtaatttggcagaacgtattacgcgcacaggtattgaagtggatgatttaattgactacacaaaagatatcaaaaatttagttgtcggcttcgttaagtcaaaagataaacatcctgatgcagataaattaaatgtttgccaagttgatatcggagaagacgaacctgtacaaatagtatgtggtgcaccgaacgttgatgcaggacaatatgtcattgttgctaaagtaggtggaagattgcctggtggtattaaaattaagcgtgccaaattacgcggtgaacgttcagaaggtatgatttgttcgttacaagaaattggtatttcaagtaattatataccgaaaagttttgaatcaggcatttatgtatttagtgaatcccaagttccaggaacagatgccttacaagctttatatttagatgatcaagtaatggaatttgatttaacgccgaatcgtgcagatgctttaagtatgataggtactgcttatgaagttgcagcattgtataatacaaaaatgactaagccagacacaacatcaaatgagcttgagttatctgcaaatgatgaactgactgtgacaatagaaaatgaagataaagtaccatattatagtgcacgtgttgttcacgacgtgacaattgaaccctcgccaatttggatgcaagcacgcttaataaaagcgggtatacgtcctattaataatgttgttgacatttcaaattatgtgttattagaatacggtcaaccattgcacatgtttgatcaagatgcgattggttcacaacaaattgttgttcgtcaagctaatgaaggcgaaaaaatgacaacattagatgatacagaacgtgaattattaacgagcgatattgtcattactaatggacaaactccaattgcattagctggtgttatgggtggcgatttttcagaagttaaagaacaaacatcaaatatagtgattgaaggtgctatttttgatccagtttcaattcgtcatacatcaagacgtttaaatttacgcagtgaatcatctagtcgttttgaaaaaggaatagctactgaatttgtagatgaagcagtcgaccgtgcatgttatttattacaaacttatgcaaacggaaaagtgctaaaagatagagtgtcttcaggagaacttggtgcatttattacaccaatcgacatcactgctgataaaattaatcgcactattggatttgatttgtcacaaaatgatattgttactatttttaatcaactagggtttgatacagaaataaatgatgatgttattacagtgctagtaccatcacgtcgtaaagatattacaattaaagaagatttaattgaagaagttgcacgtatatatggatacgacgatattccatcaacgttacctgtcttcgataaagttactagtggtcagctaactgatcgccaatataaaacgagaatggttaaagaagtgttagaaggtgctggattagatcaagctattacgtattcgttagtttctaaagaggatgctactgcattttcgatgcaacagcgtcaaacaattgatttattgatgccaatgagtgaagcgcatgcgtcattacgtcaaagtttattaccacatttaatcgaagcagcatcatataatgtggcacgcaaaaataaagatgtaaaattatttgaaatcggcaatgtcttctttgctaatggagaaggtgaactaccagatcaagttgaatatttaagtggtattttaactggagattatgtagtcaatcaatggcaaggtaagaaagaaacggttgatttctatttagcaaaaggtgtcgtggatcgagtatctgaaaagttaaaccttgaatttagttatcgtcgtgccgatattgatggattacatccaggtcgtacagctgaaatcttattagaaaataaagttgttggttttattggtgaattacatccaacattagcagctgataatgatttaaaacgtacgtatgtttttgagttgaattttgatgcattaatgtctgtgtcggtaggttacattaattaccagccaattccgagattcccaggcatgtctcgtgacattgcattagaagtagatcaaaatattccagcagctgatttattatcaacgattcatgcacacggtggcaatatattaaaagatacacttgtctttgatgtatatcagggcgaacatttagaaaaaggtaaaaaatcaattgcaatacgtttaaattatttagacacagaagaaacattgacagatgagcgcgtttcaaaagtacaagcggaaattgaagcagcattaattgaacaaggtgctgttattagataatgatttaaaccccatgtataaggatatctgaagtagattgatatccctaacatggggttttatttttggattcaccaattaggattcgattggtttaaaaagtcaaagaggaacagtggaatacagatgatgcttcgcacaactgcatataaagtcatacttatgagcaaagcaaattagtatgacttacctaataggatttcctattaggatccaatttataatgattaaaaatcaaagaggctttaaaattttttgggctttttcacgatttttaaaatgcttttttgaaatggtatctaaatgtgaaagaccgtatttttttataattttggcggcgattacatcgactttagcaccggcacctttaggaatcgtcatattaatattttttgatatttgatccatatatgtaacaaatgcgtatcgagagattatgcttgccactgcaatggctaatgacttcgattctccttttgtttcaaattttgttttctttggaagtggtatatcggataatgcgtaatggttatacacttcgcgttttgcgaactgatcaatgacgatatagtctaattgagacgaatcaattttttcaagtacatttttgatggcttcattatgaagaacagctttcatttttacttgagtccagccttttgcttgctgaatattatatttttcattgtgtagtgttaataatgaatgtgggatgaaagtaaccaattgatcagcaagttctacaattttggtatcggttaatttttttgaatcatctacacccaaagtttttaaaatagggacatgctctttggtaacgaaagcagcacatacagtcaatggaccaaagtaatcgccacttccagcttcatcactaccaatacagttaaattgatcatacattaaagtttgttcaagaaaagaattagccatatttttctttttagttttattagtattcaattgagaatgctgcggtagaagttctttagacacagcttctgcatgattaccttgaaacatgactttacctgattggtaaatatttacagttgtattttgatactttgcacgtgctttcataccttgaggtaaattctcagtatcaaaagtaatgcgtgacattaatgtcgttatgtctttatccgacaatttaaaaacgatattcgccatttgtgtaaatcctttcataaaatttcattatctttagcaaaaataatcatatcataaatgataataacgtcagaaacatttatgtatgttgtaaagaattaattgcggatacttacaaaatacatagtggtcatgtataatgtttatgaaaatgttatagtgacacaatttaaacatgataaagtattgaatagaaaattctttacattatttcattataaaaagaacattaagtcatctatagagattgtgttgttgttttatcataattgcaatataacaatattagtatcaaattcagacaaactatccagtcatattttataacgtgaatttagattttaaaaaaaggatcaggagaaattataaatggcacagtttaaaaacaaggtaaatgtatcaattaatgatcagctttttacaattgttggggaagataacccagagcacatacgatatgtagcacatttagttgatgataaaataaaagaattagggtataaagcagcaggtttagatacttcaagaaaagcaatactaactgctgtgaatattatgcatgaaaaagtactactagaagaagaaaatcgacgtttgaaacaacaaattcacaaattgcagcagcgtgagcaataaatggtcattgattttatcataatcattttctttgtgtattttgtcatggttggattcagacgaggtttttggttatctatgatacatttgagtgcaacgattgtatcattgtggattgccagtcaattttacaaatctattgtagaaagattaattgtatttattccatatcctaaaacaacagcatttaatacaacttttgcgtttcattttaatcatctacaaaatcgatttgaagcgattgtagcttttttaatgattacattgttttgtaagttcattttatatctaattatcgtaacttttgataaaataatagcgtatcaaaacattcatattttcagtcgtgcaatgggaatgatagttggtgtgtttatgacgataattgtcttacactttacgttatatctattggcattatatcctaacgaagcattacaacatcagcttaaaatatctattgtgagtcattcattgatttttcacatcccatatttatcggctttcaccattaatttataaattatcataagaggtcaggacaaaggtatatattaatgatacgtcctggtcttctttttatggagtgttattatgacaaaaaaagatgttatcaaactattagaacaaattgctacttatatggaattaaaaggggaaaatacttttaaaatatcagcgtatcgaaaagcagctcaaagtcttgaattagatgaacgaccattagatgaaatatctgatgtaacggagttaaaaggcattggtaaaggtgttgcagaagtaatcaatgattaccgtgagaccggtgaatctcagtatttacagcaattacaggaagaagttccggaaggtcttattccacttttgaaaattcaaggacttggaagcaagaaaattgctaagctatataaagagttgaatattgttgataaagcgtcacttcaagttgcttgtgaaaatggaaaagttagtgaattaagcggatttgctaagaaaacggaacaaaacatattagaagctgtgaaacaacttggtgctaagaaagatagatatccaattgatcaaatgagaagacttaatcaagaaatcattgattatatagatacattaaattatatcgatcaatattcatctgcaggaagcttccgtcgttttaaagaaatgagcaaagatttagatttcataataagtaccgataacccaaaagcagtgcagcagcaattattaaatattcccaataaagtaaaagaagttgcagtggggaacacaaaagtttcattagaattagcgtatgatgatgaaacgattggtgtcgattttcgattaattgaaccaagtgctttttatcatacattgcagcattttactgggtcaaaagaacataatataagaattcgacaacttgctaaagcacgtgatgaaaaagtaagtgaatatggaattgaacaagctgatggtacattaattcaatatgatagtgaagccaagatatatgaacattttaatgtgaattttataccacctgctatgcgagaagatggtagcgaatttgataaagatctaagtaatatcattacaatagatgatattaatggtgatattcatatgcatacaacgtatagtgatggtgcgttttctattcgagacatggtagaagcaaatatcgcaaaaggttataaattcatggtaattactgatcattcacaaagtttacgtgttgctaatggcttacaagtagaaagacttttaagacaaaacgaagaaattaaggctttagataaagaatatagtgaaattgatatttattcaggtacagaaatggatatattacctgatggctcgctggattatgatgatgaaattttagcacaacttgattatgtaattggagctattcatcaaagctttaaccaatcagaagaacaaattatggaacgattagctaatgcatgtcgcaatccatacgtgcgacatatagcgcatccaacagggcgtattataggtagaagagatggttataaaccgaatattgaacaattaatggcattagctgaagaaacgaatacagtattagaaattaatgccaatccacatcgactggatctgagcgctgatatcgttcgtaaatatccaaatgtgaaattaactattaacactgatgcgcatcatacaaatcatttagattttatgaattatggcgtagcaactgcgcaaaaaggatttgtaacaaaagatagagtgattaacgcattatcgcgtgaagcttttaaagactttattgaaaataatacaaaacttaagaaatagagggattttatgagacaaaaaacattagacgtcttagaatttgaaaaaataaaatcactcgttgccaatgaaactattagtgacttaggcttggaaaaggtcaatcaaatgatgccagctactaattttgaaacggttgtttttcaaatggaagaaacggatgagattgctcaaatttataataagcatcgtttaccaagcttgagtggcttatctaaagtatcagcattcattcatcgcgctgatattggcggcgttttaaatgtatcagagcttaacttgataaaaagattaattcaagtacaaaatcaattcaagacattttataatcaattggttgaagaagatgaaggtgttaaatacccaatattagatgacaagatgaatcaattacctgtgttaactgatctttttcatcaaataaatgaaacatgcgatacgtatgatttatatgataatgcgagttatgaattgcaagggattagaagtaaaatttctagcacgaatcaacgtattagacaaaatttggaccgtattgttaaaagccaagcaaatcagaaaaaattatcagatgctattgtaacagttaggaatgaaagaaacgttatacctgtcaaagctgaatatcgacaagattttaatgggattgtacatgatcaatctgcttcaggacaaacattgtatattgagccatcatcagttgttgaaatgaataatcaaattagtcgattacgtcatgacgaagcaattgaaaaagaacgcattttaacgcaactaactggttatgtggctgcggacaaagatgcactacttgtggcagaacaagtcatgggtcagttagattttttaatcgcaaaagcgagatatagtagaagtgttaaaggaacaaagccgatatttaaagaggaccgtactgtatatttacctaaagcataccatccattattaaatcgtgagactgttgtagctaataccatcgaatttatggaagatattgaaacggtaattattacaggaccgaatacaggtggtaaaactgtaacattaaaaacattaggtttaattattgttatggctcaatcaggattgttgattcccacacttgatggtagtcagttaagtgtatttaaaaatgtatattgcgatatcggagatgaacaatcaatagaacaatcattatcaactttttcatctcatatgacgaatatagttgaaattttaaagcatgcagacaaacatagtttagttttatttgatgaattaggtgcaggtacagatccgagtgaaggtgctgcattagcaatgagcattttagatcatgttagaaaaattggttctctagtaatggcaacgacgcactatcctgaacttaaagcatatagttataatcgagaaggcgttatgaatgcgagtgtagaatttgatgtagatactttgagtccaacgtataagttattaatgggtgtgccgggtcgttcaaatgcttttgacatttctaaaaagttaggtcttagtttgaatattattaataaggctaagacgatgattggtactgatgaaaaagaaataaatgaaatgattgaatcattagagcgtaattacaaacgtgtagagacacagaggttagaactggaccgtcttgtaaaagaagcggagcaagtgcatgatgatttatctaagcagtatcaacaattccaaaattatgaaaagtctctaatagaggaagcgaaagaaaaagcaaatcagaagattaaggctgcaacaaaagaagctgacgatattattaaagacttaagacaattgcgtgaacaaaaaggtgcagatgttaaagaacatgaattgattgataagaagaaacgattagatgatcattatgaagcgaaatctataaagcaaaatgtacaaaagcaaaaatacgataaaattgttgctggtgatgaagtaaaagtattatcttacggtcaaaagggtgaagttttagaaattgtcaatgatgaagaagcaattgttcaaatgggaattattaaaatgaagttacctattgaagatttagagaaaaaacaaaaagaaaaagttaagccaacgaaaatggttacacgtcaaaatcgtcaaacaattaaaactgaacttgacttacgaggctatcgttatgaggatgctttaattgaactagatcaatatttagatcaagccgttttaagtaattacgaacaagtttatatcattcatggtaaaggtacaggtgcacttcaaaaaggtgtacaacaacatttgaaaaagcataaaagtgttagtgactttagaggtggtatgccaagcgaaggtggatttggcgttaccgttgcaacactaaaataaattataatttgataaattaaatagctgcagttaaaataatgtaaagcaacaagaatacatttcaaacatgttatttgaaataagcataaaaattgagcaaatagaaatacatgaagcatgttatctgatataatttgaacatcataataataattaaggaggattggcatttatggcaatcgtaaaagtaacagatgcagattttgattcaaaagtagaatctggtgtacaactagtagatttttgggcaacatggtgtggtccatgtaaaatgatcgctccggtattagaagaattagcagctgactatgaaggtaaagctgacattttaaaattagatgttgatgaaaatccatcaactgcagctaaatatgaagtgatgagtattccaacattaatcgtctttaaagacggtcaaccagttgataaagttgttggtttccaaccaaaagaaaacttagctgaagttttagataaacatttataagttacaaccaatgacgactggggcatttctttaatgaattgctccagtttttgtttgtgtttttaatataaaaagttgaatgataagtcatcatattgtttacgacttgagaatggtgggattaataaatctatgaacgttaaatgataatctagcatgcagatagatttgtagcagttggtttgataaaacaatgttcaatattacatgatgtgcatgaaaagtcatactcgaagatgttgattattaactagaattagtggtgataaatttgaagcacttttgtagcatcattcattttaaaattagaaggggggatatttttggaagactataagcaacgaattaaaaataaattaaatgtcgtacctatggaaccaggctgctatttaatgaaagatcgtaatgatcaagtgatatatgttggcaaagctaaaaagctaagaaatcgattgagatcatattttacgggtgctcatgatgctaaaacaacgagactggttggtgaaatacgtcgctttgagtttattgtcacgtctagtgaaacagagtcacttttacttgaattgaatctgattaaacaatatcaaccaagatataatatattattaaaggatgataaaagttatccatttattaaaattacgaaggagaaatatcctagactactagtgacgagaactgtaaaacaaggtactggcaaatatttcggaccgtatccgaatgcatattctgctcaagaaactaaaaagttattagacagaatatatccatatcgcaaatgtgataagatgccagataaattatgtctttattaccatattggacaatgtttaggaccatgtgtatatgacgttgatttgagtaaatacgcacaaatgacgaaggaaattactgattttctgaatggggaagacaaaacaattttaaaaagtttagaagagcgaatgttaactgcaagtgaatcacttgattttgaacgggctaaagaatatagagatttaattcaacatattcaaaatctgacaaacaaacaaaaaattatgtcatcagataaaacgattcgtgatgtctttggttatagtgttgataaaggatggatgtgtatccaagttttctttatacgacaaggtaatatgataaagcgagatacaacgatgattccattacagcaaacagaagaagaagaattttatacatttattggacaattttatagcttaaaccaacatattttacctaaggaagttcatgtaccacgtaatttggataaagaaatgattcaatctgttgtggacactaaaatcgttcaacccgcgcgaggtcccaaaaaagatatggttgacctagctgcacataacgctaaagtatccttaaataataaatttgaattaatatcacgtgatgagtcaagaacgattaaagctattgaagaacttggaacacaaatgggaattcaaacaccaattagaattgaagcattcgataattctaatattcaaggtgtggatccagtgtcagcaatggttacatttatcgacggtaaaccagataagaaaaattatagaaagtataaaatcaaaacggttaaaggtccagatgattacaaatcaatgagagaagtagtaagacgacgatattctcgcgttttaaacgaaggattaccattacctgatttaataatagtagatggtggtaaaggacatatgaacggggttattgatgtgctacaaaacgaattaggtcttgatatccctgttgcaggtttgcagaaaaatgataaacaccaaacatctgaattattatatggcgctagtgcagaaattgtaccactgaagaaaaatagccaggcattttatttgttgcaccgtatccaagatgaggttcacagattcgcaatcacatttcatagacaaacacgtcaaaagacaggcttgaaatcaatacttgatgatatagatggtatcggtaacaaacgtaaaacattattattgcgttcattcggttcaatcaagaaaatgaaggaagctacacttgaagattttaaaaatataggtattcctgaaaacgtcgcaaagaacctacatgaacaattgcataaataaattactgggcgtgagaatcattctcatgccccaaaatatatgaaataatgttacaatatggttaacaaagttatttttttgaatgtacgtggaagcgttttctaaatgagaaagtttatcatcacaagcaattttagatatcgaatccaaatgttacattgttcgacatgcagtttggtgatcgtgcagtgtgtatttgtctttaaaatgtttcgcttaatgataatgacaacgctagaaacgatatcactttagggggttaagcgtacgtttaatataaatagctcaataaattaaatattcgttcacaggggggactccttttggctcaatcaaaaaatgaattttatctaagacgtattcactcgttattaggtattatcccaataggtgcatttttggtcgttcatttattagtgaatcaccaagcaacacaaggtgctgaagcgtttaataaggcatctaactttatggaatcattaccatttctaattattgtagaatttttatttatatacattccgttgttatatcacggtttgtttggtatacacattgcatttacagcaaaagaaaatgttggacattactcgatttttagaaactggatgttcttcttccaaagagtgagtggtatcttaacatttatctttattggtatccatttatggcaaacacgtttacaaaaagcattttacggcaaagaagtgaattacgatttaatgcacgaaacattgcaacatcctggatgggcaatattttatattatttgtattattgctgttgtgttccactttgcaaatggcttatggtcattcttagttacttggggtggacttcaatctccaaaatcacaacgagtatttacatgggtttcattaatcgtatttttagttatttcgtatattggtgttactgcaattattgcctttatgtaatacatcgcatttaacaaatatagattgaaaatttaggggagtgaaatttttatggcagagaaacatcttattgttgtcggaggtggcctagcgggcttaatgtcaacaattaaagcggcagaaaaaggtgcacatgtagatttgttctcagttgtaccagtaaagcgttcgcactctgtttgtgcccaaggtggcattaatggtgcggtcaatactaaaggggaaggcgattctccttggattcactttgatgatacagtgtatggtggcgacttccttgcaaaccaaccacctgttaaagcgatgacagaggcagcacctaaaattattcatttattagaccgtatgggcgtaatgttcaatagaacaaatgaaggtctattagattttagacgtttcggtggtacattacatcacagaacagcatatgcaggggcaacaactggacaacaattattatatgcattggatgaacaagttcgtgcatatgaagtagatggattagttacgaagtatgaaggatgggaattccttggcatagttaaaggtgacgatgatagtgcaagaggtatcgttgcacaaaatatgacaactgctgagattgaaacatttggttcagatgcagttattatggcaacgggtggccctggtattattttcggtaaaacaacaaactcaatgattaatacaggatcagcggcttccattgtttaccaacaaggcgctatttatgctaatggtgagttcattcaaattcatcctactgcaatccctggtgatgataaactgcgactaatgagtgaatcagcacgtggtgaaggtggacgaatttggacatataaagatggtaagccttggtacttcttagaagagaaatatcctgattatggtaacttagtacctcgtgatatcgcaacgcgtgaaattttcgatgtatgtattaaccaaaaattaggtataaatggcgaaaacatggtatatcttgatttgtcacataaagatccacatgagttagatgtaaaactaggtggtatcattgagatttatgaaaaattcactggtgatgacccacgcaaagtaccaatgaagattttcccagctgttcactattcaatgggtggtctatatgtagattatgatcaaatgacaaatattaaagggttatttgcagctggagaatgtgacttctctcaacatggtggtaaccgcttaggtgccaattcattgttatcagcgatttatggtggtacagtagcaggtccaaacgcgattgattatatttcaaatattgatcgatcatatactgatatggacgaaagtatttttgaaaaacgtaaagctgaagagcaagaacgttttgataaattattagctatgcgcggtacagaaaatgcctataaattacaccgtgaacttggtgaaattatgacagcaaatgtaactgttgttcgtgaaaatgaaaaactgttagaaacagataaaaagattgttgaattgatgaaacgttatgaagatattgatatggaagatactcaaacttggagtaaccaagcggtattctttacccgtcaactatggaacatgttagtacttgcacgtgttattacgattggtgcatataaccgtaacgaatcacgcggtgcccattataaaccagaattcccagagcgtaatgatgaagagtggttaaaaacgacaatggcctcattccaaggcgcatttgaaaaaccacagtttacttatgatgacgtcgatgtgagtttaataccacctcgtaaacgtgattacacaagtaagtctaaagggggtaaaaaataatgactgaacaatcagtgaaaaacactccacaacatgaaacacaatctaaaccgaaacaaaaaacagtaaaattaattattaaacgacaagatacaagtgattctaagccttatgaagaaacatttgaaattccatatcgtgaaaatttaaacgtcattgcttgtttaatggaaattagacgtaacccagttaatattaaaggtgaaaaaacaacacctgttgtctgggatatgaactgcttagaagaagtatgtggagcatgttctatggttatcaatggtcgtgcaagacaatcttgttctgcgattgttgatcaattagaacaacctattcgtttagagccaatgaatactttcccagttatccgtgacttacaagttgatcgttctagaatgttcgataacttaaaacgtatgaaagcatggatcccaattgatggaacgtatgatttaggtccgggaccacgtatgccagagaaaaaacgtcaaacagcttatgaattatctaaatgtatgacatgtggtgtatgtttagaggtttgtcctaatgttactgaaaataataaattcgttggtgcgcaagcaatctcgcaagttcgtttgtttaatttgcacccaacaggatctatgactaaagatgaacgtttaaatgcattaatgggtactggtggcttacagcagtgtggtaattcacaaaactgtgttaatgcttgccctaaaggtattccattaacaacatccattgcagcaatgaacagagaaacaacattccacatgtttaaatcattctttggttcagaccatgaagtagaataaaaattaatcccttttgagttaaaatgttatgttcctttcaaaattaaattgaatggagatacacaataacttggaagggatttttttaataagcagattacatgacaatatgatagtgggctgatttaaaataaatattataatgacaaaaatggtaaacacagtgcataatactaaaatccaatgcttagttatgataaactaaaaattaaattaaaagtaaggatgaccgaatatgaataaaccaataggtgtaatagactctggtgtcggaggtttgacagtagctaaagaaattatgcgtcagttgccaaatgagacgatttattacttaggtgatattggacgatgtccatatgggccaagaccaggagaacaagtaaaacaatatacagttgaaatcgctcgtaaattaatggaatttgatataaaaatgctcgtgattgcttgtaatacagcaactgctgtagctttagaatatttacaaaagaccttatcaatcccagtgattggcgtaattgaaccaggtgctagaacagcaataatgactactagaaatcaaaatgtattagtactaggaacggaaggcacaattaaatctgaagcatatcgtacgcatattaaacgtatcaatccacatgtagaggtacatggcgttgcctgtccaggttttgtgccacttgtagaacaaatgagatatagtgatccaacaattacaagcattgtcattcatcaaacactgaaacgttggcgtaatagtgagtctgatactgtcattttaggatgtacccactatccattgctctataaacctatctatgattattttggtggtaaaaagacagtgatttcgtctggattagaaacggctcgtgaagttagtgcattgctaacatttagtaatgaacatgcaagttatactgaacatccagatcatcgattttttgcaacaggtgatcctactcacattactaacattatcaaagagtggttaaatttatctgtcaatgtggaacgtatatcagtgaatgactaggaggatttttaatgaaagagattgttattgcatcgaataatcaagggaaaataaatgactttaaagtaatatttccagattaccacgtaataggtatttcagaactaataccagattttgatgtggaagaaacaggatcaacatttgaagaaaatgctatattaaaatcagaagctgctgcaaaagcattgaataaaacagtcatagctgatgacagtggactagaagtttttgcattaaatggtgagccaggtatatactctgcacgttatgctggtgaaaataaaagcgatgaagcaaatattgaaaaattattaaataagcttggtaatacaactgatcgtcgtgcgcaatttgtttgtgtcataagtatgagtggccctgatatggaaacaaaagtatttaaaggtactgtttcaggtgaaattgcagatggaaaatatggcgaaaatggtttcggatatgatccgatattttatgtaccgaaattagataaaaccatggctcaactttcaaaagaacaaaaagggcaaattagtcatagacgaaatgcgattaatttacttcaagcttttcttgaaggtgataaaaatgtctaaatggattattgtgagtgataaccatactgaatcaggcgttttatatcaaatttatgaaatgcacccagatgcagatgtatatttacatttaggagattcagaattcgcgtatgatgatacggaacttagcttatttaatagagtaaagggcaattgtgatttttatccagaatttgaaaatgaagcggtcgcaaaatataatgacgtgaaagcattttatactcatggacatttatatcaagtcaatcgaacaagagatttattagctgaaaaaggacttgaattaggttgtttgtttgcattttatggacatacacatgtggcaaaatatgagtatattaatggtgttcatgttattaatcctggaagtatatctcaatctagaagttcaatggaagaaacatatgctgaagttattattgatgatcaaactttacatggcaccatcaatttcaaaaatcgacatcacgaaacaatcagtcatactactttttaaatagaagtagctatggctttttttagtttatagactgatttaactaggaggtcgtgtcatgaatgtttgtttaaaagtatttctgacaattttataagataattggaatgaataacacatttatgttatgaaaagaattgtaattttggagaatgtgattgttgatgaccctataaggttgaatcatgttgattatttggttaaaagtgtattattaaaaagtataaaattaagattccaagaagtcaggaaatttgaaattttagttaaaatcatgaatcgtatacatatttaaaaggatttctaaagtcataaattatatcaataatttgatggttaaaatatggagtagcaaaattcttgaaattcagaaatgtagtgacacaaatattaatgtttagttaataaatagttaatgtagttttttgtatctgtctattattataaatatatacaaaataaatatttgaggataggtgttattaattatgaaaaagaattttattgggaaatcaattttaagcatagctgctattagtttaacggtatcaacgtttgccggtgaatctcatgcacaaactaaggttgaaaaatataacgagtatcaaacaaactttaaaaaacaagtaaataaaaaagttgtggacgcacaaaaagctgtaaacttgttcaaacgtacaagaactgttgcaacacaccgtaaagcacaaagagctgttaacttaattcatttccaacacagctatgaaaagaaaaaattacaaagacaaatcgatctagttttaaaatataatactttaaaataattgatagaagccatgctatagagtgtggctttttgctatatccaaaggtataattattttataatattgtgtttatttgaatggtgagcttattgggataaataatataaataattacttaaaagtgaatgcaatagttgtttatgttttgaacaagcgaggtggctattgtgaaaaggaaatcgaatgtattaacaatcataaaaattgtaacggatatagtggcaaccgtgttaatcatacgtgctttattaaacagtcgtaaagatgctaaataaattagaagttacttaaaataaaaaaagcacgccaaaacgttagcattgttttctaacgtttggcgtacaactatttaattcagtatgttttttaataccaagtaatcgaatcgatttcgccgtttttaaccactggaatattttttctatgttcttctaatgggcgagtgatatcgaaggtataataaccatttttaccaccgtctttgatttttactacagctattgtattgcctttacccatctttttagctattacatataagtcttcaacagttttacctttatagtgttcgtttttttcatcggcttcttttattaatttatcagcacgttcatcgtcctttttagcttggtctgctaaatttttagcgatttctaaacctttccattcataactaaagaacgccttagcatcattagtttgagttagaagacctgtagcgatgactgtagatgcaataattacttttgtgatattttttttcataataagttctccctgtaaaataaatttgtacttactaatgcgagtacactgctattttacaaacggtttcatgcatttaccagttaacacttcattaattaaaattaagtgcaaattaataaggtttaatgcaatcgaaaaagaataatgatgaatttgatggtattatttttatttgaggtattattgaatttgttgatagtataataatagtagtaaacgtcactcaactatgattggataatttttattgttaaaacgatatatatttctttgcattttgtttgcaatgttgggtagacaaacactccaaattgttatacatatagcttttttgataattaatgtttataaaacaaagaaatgacacatagtagagaagtaattaatatgtataattttacttataaagaaataagagatatattctaattatggttgatatgttatgattaatatataagttaaaaattatactatttagttgaattatgcattttcgaagtaagcataattcaacacttacatttttaaatagataaaatagtgtaaaatcacgtgccaagattactatagagtaggcaatgagtattattggcaatcacttaagtgattgttattttttcgtggtcaataataaagatataaataaatatattgaggtcaaacgatgataattaaaattttaacaattctattactactttgtatattgagctatttggttacaaatagaaagaagccttttctgttcttaaaaacactctttatgggtgtggtatttatctttataggatatatttcactggcaatatctgccgtaattatttatggcattattcaatttatcacaattgattttggtagttttttcttaatgggtattatattaatcttgatttcaagtatattccaattatttatagttagattactttttagaaaaaagaatgtcgatttgacagaggttgtcgttttagaacatttaattcaatggttcttagtttactttgcgatctatcaagcagtaaatgaaaaaatggacattaatgatattaatatcgacaattttcaatctgtcttttttgacgtgtctaatttgaatttagtaattctaccaacgttaatcattagctgggtcacaatatttaactatagaatgagaagttacaaataaaatcaatgaaattataccatcagacaccaacattcaaatggtgtcttttttgttgtgtggttttatttttgaaattcgaaaaagtagaggcatgaattttttgactagtgtataagtgctgatgagacacaagatagataactatattttgtctatattataaagtgtttatagttaattaataattagttaatttcaaaagttgtataaataggataacttaataaatgtaagataataatttggaggataattaacatgaaaaataaattgatagcaaaatctttattaacaatagcggcaataggtattactacaactacaattgcgtcaacagcagatgcgagcgaaggatacggtccaagagaaaagaaaccagtgagtattaatcacaatatcgtagagtacaatgatggtacttttaaatatcaatctagaccaaaatttaactcaacacctaaatatattaaattcaaacatgactataatattttagaatttaacgatggtacattcgaatatggtgcacgtccacaatttaataaaccagcagcaaaaactgatgcaactattaaaaaagaacaaaaattgattcaagctcaaaatcttgtgagagaatttgaaaaaacacatactgtcagtgcacacagaaaagcacaaaaggcagtcaacttagtttcgtttgaatacaaagttaagaaaatggtcttacaagagcgaattgataatgtattaaaacaaggattagttaaataaaacttcaatcgttgctgttatctggaaataattaattaaatgttatgttaatttttgttaatgaaaaaagtaatctatttaatgacaggttaatgtaattgtcctgaaattgactatatactcagtaagtatcaattttaaggagagcttataatgaaatttaaaaaatatatattaacaggaacattagcattacttttatcatcaactgggatagcaactatagaagggaataaagcagatgcaagtagtctggacaaatatttaactgaaagtcagtttcatgataaacgcatagcagaagaattaagaactttacttaacaaatcgaatgtatatgcattagctgcaggaagcttaaatccatattataaacgtacgattatgatgaatgaatatagagctaaagcggcacttaagaaaaatgatttcgtatcaatggctgatgctaaagttgcattagaaaaaatatacaaagaaattgatgaaattataaatagataataaataaaacaggttgagacaaaaaatggtcttaacctgttttcaatttgcatatgtgataaattctatatcaaaatgcttatgtataatgaatgacatttaaaagtaggggagacaaatataaatacaatagttcctaggattactctcaaaataactatatcaattatttactttgctctcctattttttaaaatatgtacatgtttaaacaatcaaaagtgtacaatattaaattatcatttccagttctagtgctatattggtagtagttgactaaatgaaaataagcttataacaagttttttcaatactcgtggggccacaacagagagaaataggatcaccaattccaacagacaatgcaagttggcggggccccaacatagagaaattggatcaccaatttcaacagacaatgcaagttggggtggggcccaacacagaagctggcgaaaagtcagcatacaaaaatgtgcaagttggcggggccccaacagagagaaataggatcaccaattccaacaaacaatgcaagttggcggggccccaacatagagaaattgggtcaccaatttcaacagacaatgcaagttggggtaggacatcgataaaaaaatactttttctttagaaattagtatttcttatgcatgagttttactcatgtattcattttttaagtagacattagctacagctaatgataaagaaccactacataataaatcattagtggttctttatcatttctatctcactcttttactggaagaaaaagtttacgtttgtagaacatgccacaataccaaaaataattaagaaaaataagacgataagcatgatgacacttttcaaacaacctctatcagtttcttccgattttctttgttgaacctttttataatcttcaagtagttttgtcgcttttttatttatatgtttattcatgatgttgactccttataatatatgtttaattcattaaaatagttgaaaacatgacttgaaataaagatataaagctaaagtaaggatgttcaattgtttcaaattttatgaaagtataacgttaaatatgttaatttgatgatatttgctttttattttccaaatggaatttccttaaactgatgcattaaaatattaatgaagcactagaatacataaatgaatagtaatggtgcacagtatagaataattaaggctatattaagtataaatatcgttaactgtaagctatctttagttttaatataaactattaggataatcgacgtaagaagaatcatatatattaatgatgaagaagtccatacaaaatccgcatcatttgttgttaataatgggactataattaatccgaaattaatcatgcatgctatatatactataatgttatacacaatgttaatttttgttcaccaccttatacttctattttaaaaacttctttataatgatatattgtttaatgttgaaataattagattatctaattttcatttgctttacatgtaaaaggctatatatagtatgctctttatgattctaaatgctttttaatatttaatgctcatcaacatttggattttgaatattcaattcaaaaactttattagctacgtcaattgtaaaatcagaaccatagttgacatgagctacttttaattttccatctaaataatagattgcgattgcaacatcgtaaaattcgtcaatgacaaataaactcttttcatttgttacaacctcatgctctcctgagtatacaacgttaatttcccaatcattaaaaaccatttgttaacctccttgaacatttaaattgattcaacttaagtttaacttattcatacaacttcgtacaatatctagatgaacattaattgtatttctagaaatctttttcaattatatgtactaattatacttttaaatttcttatttcagtatagttttaaaacgattttaaaataattctgcaaatatattaacacataatgtgttcaaaaagttttgaacaatttcaaaacttttatataaagggtttgacaacatggaattcaaatttcttattttaaaaatcacctcatatagtgtcatgtttagtctaatttttaagtcaggaaagcaaatcaagtacatagtttaaattaaaaatatcataagttaattaaactaaattaagtataaaaattagccgaaaaacatcatttctgaagttatcggctaaagttataaattatatttatttgtacatgtacaaataatttacattaatttgtcatttcttctttttcccaatcgattttatatctttctgaagaacgatctgtccatttatctttagtattggtacctttccaatttgttgaagtccaatgcaattggtaatcatcacgaactcgttcgtatattacatctatatttgtttgttgtttggatgcttttctatccatagtaataactgtagcgaagtctggtgaaaaccctgaagataatagagaacttgctttgttaggatcaaggaagttatctgctgctttcatagaaccatttctagttttcatgaaaagttgattgccatataccgggttccaagaatctctatcatatggtccccaattttgattcaccatattgttaaatatcactttccagcctacttttttatcagttgggctctctaaaattgttttgaaatcaggttgaacatatttcagtgtatgaccaatcgaaacatttgcaccaataaggccgccaatttttcctgtatcatcaccagtaacattaccgttgaatccataagttaaagtactcatatactcttttgtatcaatcgaatttcttggatagtaatcagatatttgagctacttcattatcaggtagttgcaactgtaccttaaaggctgaaggccaggctaaaccacttttgttagcaccttcttcgctataaactctatattgaccagcaatggtacctttcgttctaataactagcagttttttattgtgatttttatcatcgataaaactataaaatacttttttgtgcatgccattttctttatcataagtgactaaatcacctgtttttactgtagtattgcttccaatatctgtagtaccggttttaatattaatatcagaatctgcggcattagcgacaggattcattaatatggaacctagcaatagtgttgttgttactgagctgactatacgtgttttcattttcatcatccttctatttttttaaacgatttgaggaaacaataatcaatatgtcaatttagaatattgcagttgagacatatcaaatatttataatcgtttatattagtatatttaatatagcaactgataaattactgagtgatgatgagtgattattttaagaatatgtttttaacttttatttaaaatttgaaaggaagcatttcaatttcgagggttagtcaaagttgaataaattctttatgaaacaaggaaaagacatagctaattctattgattaatttctttaaaactaatgatttgtttgatttaaaaatgtaatcgattgcaatataaaaatacaaatatcttagaattaaatcaattaattaactattaaataaaaattaactatatattaactactgtaaattaataaatagaaatagagaaaaagggtattaattatgtttggaatttcgtcgggaataaattttgccattacatagaaatatctaatagataacgaaaaagtatcgtatgtatttttaatatagtgtaaaatattatatgtaaaataaaatgtagatttttagttagaggcattataagaaaattttgagtataggttagcttttaattatgaatcttattgaaatttgattaataaaaatatgataggggattaaaatgaaactattttatatcgtatttcttattattatatggctgaatatatttttaggaaatgaaatcatccatacactgactgttttaataacaacattatatattgttaattcaagaaaggggattaaaaatgacagagttgaataatattataaactctcttcaatctttgtttgagtctgaatcaggctataaaatttcgaaaaattcaggagttccatatcaaacagtacaagatttaagaaatgggaaaaccaaactagaagatgctagatttagaacgattattaaactttatagttactatgtctcattaaaagaacactaatcatgggacaataaagtattgctataataattgaatcattaaatgaaggaatagagcctaagacataataaatcaatgtcttaggctctacaatattatattggtagtagttgaccgaatgaaaatgcccatgtaacaagcatttttcaattataggcggggccccaacacagaagctgacgaaaagtcagcttacaataatgtgcaagttggcggggccccaacatagagaatttcaaaaagaaattctacagacaatgcaagttggggagtgacaacgaaataaattttataaaatactatttctgtcacattcctactcccaattccatttaaatatatagaaaattttacctattatatacatcatacactttaaaaattatcatttaaataatctgatttggaattaaagtgcatgaagtataagtcaccttcatatactaatcaaagaggacgtcaacagttattttattaggatttttaacataaacatttgctagatctgaatgtaatcttttgcttaaatcaatagtgtagttattaccgccaccggtgatcttaagcttacctttattacgattttcgttatataatattttattttttattaacgcttctcgtgcacggaaatcgatttctttcaatgttaatactggtttattgccttggtatattttatgcgcaccaataatcgtttgtagtttatctttgtattgcacaaaaagattataagttttatcagaaggttttgcggctggtgtaacgccacctgtaaatgtctctctataagaccaccataactgatcagtatctttgtcttttagtccaaacacatctacgtaacgaccttttaactgattaatatttccccaactttcagcgccccataaagatatatgtgctgaccatgaatatctcttaagttcaacataaatgtttccattatcatattgatatagccatttatttgaaaatgaaaaatgaggctgtgtgtaatatttaattaattcattgatgttagtttcatcttgaccaatgctataagctttagcttcagagtaaaaactaaatactggtttttgattttgaggtaatacagtacctaatagtaataatgttgtcgttaaaattatatttttcgtgatgttcttactcattagaacatctcctttcagaggaatcatgatacgaggaataagaaatttaaatgtgagcgaagtcaatatagtatttgcgattatttttattaactccattattattgttagtttgatttttcgaggataacttcaatttttgcattttgaggttttttaacatatctatttgcatcagttgatggcaaccttttacttaaatctattgtgtagttattgtctgcacctgttattttaatttgtcctttattataagaattattatataattttttacttttaattaatgtttgacgaatacgaaaatctaattcttttaaagttaaaacaggcttattgccttcataaactggaaatccgccagtaaacgtttctgctttatctttatatgtcacattcagtttatagtgtttatcgttagatgttgctgcaggagtaacaccaccagtaaacgtttcttgagataatgcaaaagaatcaatggtttcttggtcttttatgccaaaaatatcaacgcttttatttcttaattggttgatattgccccaactttcaggtccataaacttgaatatgactataccaagaaaactgtaacaacgttgcatgaatcgtaccgttatctttttgccataacgtactgttagagaaggttaaatatttttgcgagtaatatttagttaactcattaacgttagtttcgttttgatttatataataagctttcgcttcagatgaagaattgataggtgtattaggaaattgtgtagatgctgtacctaatagtaacaatgttgttgataaaataatttttttcgtgatgttattgttcattcgaatttctcctttgagtattgttggaatgtttaattataaaaaggggttaattagataattgaaattatccgcatttacaaaaggtaataggttagttagatttttcgagtatgacttcaatttgtgcatttttaggatttttaacataacggtttgtgtcagttaattttaactttttacttaaatcaatcgtgtaattatttccatcagcagttatcttaatttgacctttattaaattctccgttatataactttttattttttattaatgtttgacgaatacggaaatctaattcttttaaagttaatactggtttatttcctttgtaaaattcatgtccaccgatgatagtttgttgtttatcactatattttaaaaatagtctataaggcttatcagatgaagtagctgctggcgtaacaccaccagtaaatgtttcatcataagtccagtaaccttcaactgtgtcctcatctttagttccaaatatatcaacgtatttatttcttaactgattaatgtttccccaactctcggatccaaacacttgaatatgactataccaaacccacgtttgcaatgttgcatgaatgctaccattgggcttttgccataaccatttatttgatagtgataaatgaggctgtgtataatactttattaactcattgatattagtctcgttttcactgatattataggcttttgcttcagatgaaaaactgattggtgttttaggaagttgtgttgatgtagttcctaaaagtaacaatgctgttgataaaactaatttattcatgatgttctttttcatatgaaaatctcctttgcgtgaattacccaaagtatataagctattacaccgattcggaattaaataaaagctaaaactatgttaaataaacttaaacagttagtagtgttatttaagcaaaacttatcatttttaagttttggacagaaacagtacttaataaagtaggcgggagttatatattaaaaacgacacgttacaattattctctaatcaattgcattaaattgtttgataattgaattttctaactacttgaaaaatagttatactttaaatgtagtacttattttaattatttcctactacttaaatttaatattaataaaatgttcatttaattattgataaaatattacaaattttaatagtaggttgtgtttattttgtatgcgcttacaatttaggtgtaactaaaataaaaggagttgttattaatgaaaaatttacgaaacagaagttttttaactttattagacttttcacgacaagaggtagaattcttattaacactctccgaagatttaaaacgtgctaaatatattggcactgaaaagcctatgttaaaaaataaaaatattgcactgttatttgaaaaagattctacaagaacgcgatgtgcatttgaagttgcagcgcatgatcaaggtgcaaatgtaacttatttaggcccaactggatcacaaatgggtaaaaaagaaacaactaaagatactgcacgtgtgcttggtggaatgtatgatggcattgaataccgtggtttttcacaaagaacagtagaaactttagctgagtattcaggcgtaccagtgtggaatggtttaactgatgaagatcatcctactcaagttcttgctgatttcttaacagcaaaagaagtcttaaaaaaagattatgcagatattaactttacatatgttggagatggtcgtaataacgttgcaaatgcattaatgcaaggtgctgccattatgggtatgaacttccatttagtttgtccaaaagaattaaatccaacagatgaattattaaatcgctgtaaaaatattgccgctgaaaatggtggcaacatattaatcacagataatattgaccaaggtgtaaaaggttcggatgtaatttacactgacgtttgggtatcaatgggtgaacctgatgaagtatggaaagaacgacttgaattattgaaaccatatcaagtaaataaagaaatgatggataaaactggtaatccaaatgttatttttgagcattgcttaccatctttccataatgctgatacgaaaattggtcaacaaatttttgaaaaatatggaattcgagaaatggaagttacagatgaagtattcgaaagtaaagcttcagttgtattccaagaagctgagaacagaatgcatacaatcaaagcagtgatggttgctacattgggtgaattttaaatgatataaggaagtgaatatgatggcgaaaatagtagtagcattaggtggtaatgctttaggaaaatcacctcaagaacaactcgagcttgttaaaaatactgcgaaatcattagtaggattaataacaaaaggacatgagattgttattagtcatggtaatggaccacaggttggaagcattaatttgggacttaactatgctgcagaacataaccaaggtccggcatttccatttgctgaatgtggcgcaatgagtcaagcttacatcggctatcaattacaagaaagcttacaaaatgaattgcattctattggaatggataaacaagtggtaacactagtgacacaagttgaagttgatgaaaatgatccggcatttaacaatccttcaaaaccaattgggttattttacaacaaagaagaagctgaacaaattcaaaaagaaaaaggatttatatttgttgaagatgctggaagaggatataggcgcgttgttccttcaccacaacccatctctattattgaattagagagtattaaaacacttattaaaaatgatacactcgttattgctgctggcggtggaggtataccagtaattagagagcaacatgatggttttaaaggtattgatgcagttatagacaaagataaaacaagtgcattgttgggtgctaatattcaatgcgatcaattgattattttaacagcaattgattatgtatatattaattttaacactgaaaaccaacagcctttgaaaacaacaaatgttgatgaattaaaacgatatatagacgaaaatcaatttgcaaaaggaagtatgttaccaaaaattgaagcagccatatcatttattgaaaacaatccaaaaggaagcgtgcttataacatcattaaatgaattagatgctgccttagagggtaaagtaggtactgtgattaaaaagtaattgaattgaaacgcttttcaattactatatgtcaaatgcatgatttttattatttatgtgcaccccctgaaaataatgcctctattttgatgcggggtgcactttcttaatttatatttataaaatctttaaggtagaaatgctaggttaaatgtcgaaggagatgaaaccgtggaaaatacaattaatgaaagtgaaaagaaaaaacgatttaaattaaaaatgccaggtgcatttatgattttattcattttaacggttgttgcagttatagcaacatgggttattcctgctggtgcatattctaaactttcttacgaaccttcatcccaagaactaaagatagttaaccctcataaccaagtgaaaaaggttccgggtacgcaacaggaactagacaaaatgggagttaaaattaagattgaacaatttaaatcaggtgcaattaataagccggtatcaattccgaatacttatgaaagattaaagcaacatccagctggaccagaacaaataacaagtagcatggttgaaggtacgatagaagcggtcgatatcatggtattcattcttgtactagggggacttattggcgtagttcaagccagtggttcttttgaatcgggattgttagctttaacgaagaaaacaaaagggcatgaatttatgctaattgtgtttgtatcaatactaatgattatcggcgggacgttatgtggtattgaagaagaagctgtagcattctatccgattttagtccctatatttatagcgttaggatacgattctatcgtttcagttggtgccatattccttgccagctctgtcggtagtacattttcaactattaacccgttctcggttgtaattgcctctaatgccgctggtacaacttttacggatggcttgtattggagaataggtgcttgtattgtcggtgcgatttttgttattagttatttatattggtactgtaaaaaaattaaaaacgatcctaaagcgtcatattcttatgaagacaaagatgcttttgaacagcaatggtctgtattaaaagatgacgatagtgcccattttactttgcgtaagaagataatccttacattatttgtactaccatttccaattatggtatggggagttatgacgcaaggttggtggttcccagttatggcttcagcatttttaatatttacaattataataatgtttattgctgggacaggtaaatctggattgggagaaaaaggaactgtagatgcatttgtcaatggcgcatcaagtttagtaggtgtatctttaattattggtttagctcgaggtattaatttagtgttgaatgaaggtatgatttcagatacaatcttacacttttcatcatctttagttcaacatatgagtggaccattatttatcatcgtattactatttattttcttctgtttaggttttatcgtgccatcatcttctggattagcggtattatcaatgcctatctttgcaccactagctgatacagtaggtataccaagattcgtcatcgttacgacatatcaatttggtcaatatgcgatgttattcttagcgccgactggacttgttatggccacactacaaatgttaaacatgcgatattcacattggttccgatttgtatggccggtagttgcttttgtattgattttcggtggcggactactaattacgcaagtactaatttattcataatttgaaatgctatattataaaaatactaaatgggttttatgcatctcgtaggtttgtagaaatactaaactaagcgaggtgcattattatttttgattaagaaaataatgacggtaatcataacactagtaagtaattgatacaatactttatttaataatgatatttttaaaatttgtttttaatgtaatgttagatctatggtatattatatttatcgtggtaaaaatgtatttgctgtaaacagtttttgtaacacatgatacatatggttgtgaaaatagcatatataaaggatggctataaatgacacatttgacaaaggttttagatacactaactggaatatgcgtagtattattatttagtaaatattttgtggcgtatgcaaatatggtgtttgattggaatttaagatggtatttgctagaaaacataccacatttgccaattatattatttattctgatgtttattttcggagtaccttctgaaatgataaaagataggcaaaggaaaaataacggcgtttaatttatcgatatttagaggtgataaaatttgtcaactattacaaagactaaaataaaaatctttattaattattttattggtatattagccttggcgtttgctgcttatatattatttaaataaaggttagagtgaaacgtgtttatgaactagacgttctagtatagttactacagctttagtcagaaggtatcattgataagatcatattaaatcaaagaggcattgatatacactaaaaagaggcaagattacctgcctcttttttagttattaaatatgcgtgttaattcttggtaatagtgttactgagacgcattacgaagaaatttatcttgtttttccttttttaaaaagaagtgaaggtatcctataaagactctaagtactattacagtggctaataacacttcgataaacaaaagacctttccaaatgtctggaaacataagtacaggcaaactgttctttaaagcagttgctgagattactaaagggaatgtgaaagctgaaaatacgggcgaaaaaggttcttttagtaatttaggcaattgtataatgatataaaaataaaatatttgagctaatattaaaaatataattacgataaaagcattcgccttaggaaaggctataacatatgctgcagcgactaaagaaaatggtgcacaaattgtcgatgtgttcggtttgattgacgtctgcaatggaaatgcttttaatcgcttgaaaactataggtaagacaatagaagtagctacaaagccatatattactgttaattgacctatgaaaaaatatccgctaacgggtgccgtcaatcctgcgatagcaataccaataaaaagtacagtccacgaaggataaacattttcaagtgaaaaatcttttaaatattttattgaaaaaataatcatatgcgtcataattcccacaaggcataaaatccaaataggcgttattaagctattgataaaagttatgttactaaaaaatgtatttaaataagtagtacctaaaaagccagacatgaaaaatgttgtgaacactgatgaaactagaggactgtttaattgttctttcacattattaaaatatttgatcatagtacataaaaggtgaatccaaatcaagaaagcaaagattccgcaaacagcgtttaaagtaagagataagtcttttaatagattacccaggcctaataatcctaagactagtcctgacgttactagaggtgctttttgaagtctcatgatttacaacctttcttatgtgattttcttcactaattatatcatgatagctatggccaattaataagaagagtgtgtactattacgttattagagtatgtatattggattgatagacacataattgacatttaaatctcaaaattaatgatatttgaggtatgctttgcaacctaaatattggaatatgtggaaaagtaattatttaatttaaatgatgattgaagatttacaagggggtgtacaaaatgagaaatcaaattcaaaaactattagacagtgatttgagcagtttacatatatcgaaacaaacaggagttccacaaagcacaatacacagaatgagaaaaaatgaaagatcattagacaatatgtcattgaaaaacgctgaactactttataaatttgccaatagtatatttagcaatgaaaattaagaagaataattagtgagttaaataattaaaaaaccacgtctcgatggacgtggttattttttttagatgtatataattataattataggatttcgggcccctgaaaagtccctaaaattttgaatagtatcaaaatctataggaataatataataataaaaatctctacgcatgcaaatggtgagtgttaaaaatcttggtgtagtgttggtgtagttcaggtgcagtatagatgaaatttgagcacaaaattacttaattaaaaatgtataaacaagtgtcagacgcgtgtcaattgtgtgtcaaaaaattctataacgaataagcatgcttgttttaattactgtattttcggggcttatgcgggggacgttttggtgacgcatcatactatattactgaaattcaaaacaaaaagagccccgtaatcacggaactcttttgtttggtaatgcgtataaaaatacctataaacgtcctgggagggattcgaacccccgaccgatggcttagaaggccattgctctatccagctgagctaccaggacacgtttaacaacacaagaattattatatctaaatgaacttaaattagcaataccttgtaaataaaaaatgtttatatttttcactattatagagctatttatctaaaaaggttcaataagacttaaatacgaattcaggcaacttaattgtgttaaatacagttttgaatgcctaactgtatttcttttctctttaaaatacagttaagtacattataagatgttgtgcggataaacaaactaattgcatcaaatttattttaaaataacaacaacaaaacgttaagcgaataacatttcggtgatttaaaagctacgcacgtttttgttatcttcaaatttaaattttaaggagtgttttcaatggaaggtttatttaacgcaattaaagataccgtaactgcagcaattaataatgatggcgcaaaattaggcacaagcattgtgagcatcgttgaaaatggcgtaggtttattaggtaaattattcggattctaatttcaatatgttatgtaagtaatcagtattatttcaaaggtgagggagagatttaaatgactggactagcagaagcaatcgcaaatactgtgcaagctgcacaacaacatgatagtgtgaaattaggcacaagtatcgtagacatcgttgctaacggtgtgggtttactaggtaaattatttggattctaatataataactaatattctttaaaataaactgggtgagcatactttaatgttatgcactcagtttattttatttgcagaaatttgagcctctgttaagatttagatacatagacaatataggagatggggaaattgggatataaaaatattttgatagactttgatgatacaattgttgatttttatgatgcagaagaatgggcgtttcactatatggcgaatgtttttaatcataaagcaacaaaggatgattttttaacatttaaaaaaatcaatcaccaacattgggaagcttttcaacaaaataaattaacgaagtctgaagtattatcagaacgatttgtgaattacttcaaacatcatcaaatggaagttgatgggcatcgtgcagatgtgttatttagaaatggattagcagaagctaaagttaaatactttgatcaaacattagaaacaattgtcgaattatcgaaaagacatgatttatatattgttactaatggtgtaaccgaaacgcaaaagagaaggttaaatcagacgccgttgcataaatatattaaaaagatatttatatctgaagaaacaggatatcaaaaacctaatccggaattttttaattatgtttttaatgatattggtgaggatgaaagacagcactcgattatagttggagattctttaacatctgacattctaggtggaatcaatgcgggtatagctacttgctggtttaattttagaggatttgatcataatccaggaattatacctgattatgaaattaattcatggaaacaactaaatgatattgtacgttaagacaaataatttgaaaatgatttacttatattagcttaagaaagtaattgtaaaaaagacactacgaaaagatgcattttcatgctcgtagtgtcgaatattattatcttatggtttccacaataagacatcatgtccctctatatttttagcttccacatctgtaaatccatgatgtaaaaagaaatccttagaatcatttctgccaatggctttaattggcatattgaaactctttgcaaaatcaatcaattctgaagcgtaccctctgttttgatattttggtaatacttctaacttccataataatatataatcttcaaaatctgggaagtagatttcttcgacatcacctttttttagtaatgccattctagctcctaattgatctccgacaaatatgccataaaatggtgaatctgaacttgcatcaatcatttgaccgtttaactcattgaccatgtataagtctttgttgccaaacgctctaaagttttcgaataattcgtcagttttgtaattaatttcaagacgtttgatttcactcatatttatctaccccttatttgtttactactattattatacattaaaccacttgtgtttttcattgatttgaaaatgtaaaacaatgaatattataaattttccatgattaaattgattttcaagccgtaaaattgtcaatcaccggtatagactttatactatagtttgtaatcgcgtacttaaggagaaaaaacatggactgtaaagtagttagtttaaatgaaaaagatcagtttataccaaaaataaagagcagtgaccctgtaataacaggattatttcaatatgatgcagctcaacaaactagttttgaaaaaaggatgtctaaagaaaataatggaagagaagcggcattagcgaatgttattcgtgaatatatgagtgatttaaagctttcaagtgaacaagaattaaacatacaacatttagctaatggttcaaaagttgtgattggtggacaacaagcagggcttttcgggggaccattgtatacattccataaaatattttcaatcattactttatctaaggaattaacggatacacataagcaacaagtagtaccagttttttggattgcaggagaagatcatgatttcgatgaagtgaatcatacatttgtttataacgaaaatcatgggtcgctgcataaggttaaatatcatacaatggagatgccagagacgactgtctctagatattatcctgataaggctgagttgaaacaaactttaaaaacgatgttcattcatatgaaagaaactgttcatacacaaggtctactggagatttgtgacagaattattgaccaatatgactcgtggactgatatgtttaaagcactactgcatgaaacatttaaagcatatggcgttctatttatagatgcgcagtttgagccgttaagaaaaatggaagcgcctatgtttaaaaagattttgaaaaaacatcagttgcttgatgatgcttttagagcaacacaacaacgtactcaaaatcaaggcttgaatgcgatgatacaaacagatacaaatgttcatttattcttacatgatgaaaatatgcgtcaattagtttcgtatgatggtaagcattttaaattaaataaaacagataagacatatataaaggaagaaattataaatattgcggaaaatcaacctgaattattttctaataatgtagtgacaagaccattaatggaagaatggttatttaacacggtggcatttgttggaggaccgagtgaaattaagtactgggctgaactaaaagatgtatttgaactatttgatgttgaaatgcctatcgtgatgccaaggcttagaattacttatttaaatgaccgtatagaaaaattactttcgaaatacaatattccattagaaaaagtgttagtcgatggtgttgaaggagaaagaagtaagtttattagagaacaagcatcacatcaatttattgaaaaggtagaaggtatgattgaacaacagcgtcgtctaaacaaagacttattagatgaagtggcggggaatcaaaataatattaaccttgtgaataaaaataatgaaattcatatacaacagtatgattatttgttaaaacgttatcttttaaacattgaaagagaaaacgacatcagtatgaagcaatttagagaaattcaagaaacactccatccaatgggaggattacaagaaagaatatggaatccacttcaaattttgaatgattttgggacagatgtgttcaagccctccacctatccaccactttcttacacttttgatcatattattataaaaccttaatataccaagggtttagcccgatttatcttaatgataaatcgggcatttttttgttttttaaaataaatttcacaaattttgtataaatagtggtggatagtggggagatgtggtaaattatatataaggtgaggtgataaaaaatgttcatgggagaatacgatcatcaattagatacaaaaggacgtatgattataccgtccaagtttcgttatgacttaaatgagcgttttattatcacaagaggccttgataaatgtttattcggttacactctagacgaatggcaacagattgaagagaaaatgaaaaccttacctatgacaaaaaaagacgcacgtaagtttatgcgtatgttcttctctggtgctgttgaagtagaacttgataagcaagggcgtattaacatccctcaaaacttgaggaaatacgctaatttaactaaagaatgtacagtaatcggtgtttcaaatcgtattgagatttgggatagagaaacttggaatgatttctatgaagaatctgaagaaagtttcgaagatattgctgaagatttaatagattttgatttttaaaatggaggaattgaagtgtttcatcatatcagcgttatgttaaacgaaaccattgattatttaaatgtaaaagaaaatggtgtgtacattgactgtacgctaggtggagcgggacatgccctttatttactaaatcaattaaatgacgacggaagattaatagcaatcgatcaagaccaaactgcaattgataatgctaaagaggtattaaaggatcatttgcataaggtgacttttgttcatagcaacttccgtgaattaactcaaatattaaaagacttaaacattgaaaaagtagatggaatttattacgacttgggtgtttcaagcccacaactcgacattccagaacgaggattcagttatcaccatgacgcaacattagacatgcgtatggaccaaacacaagaactaacagcatatgaaattgttaacaattggtcatatgaagcgttagtgaagattttttatcgctatggcgaggagaaattttcaaaacagatagctcgaagaatcgaagcacatcgcgaacaacaaccaataacaacaacattagaattagttgacattataaaagaaggtattcctgcaaaagcaagaagaaaaggcggacatcctgcaaaacgagtatttcaagcactacgaattgcagtaaacgatgaattgtcagcttttgaagattcaatagaacaagcgattgaattagtgaaagtagatggcaggatttcggtaatcactttccattctttagaagatcgtttatgtaaacaggtgttccaagaatatgaaaaaggtccagaggtaccaagaggattaccagttataccagaagcatatacacctaagttaaagcgtgttaatcgtaaaccgattaccgctacagaagaagatttagatgacaataacagagcacgaagcgcgaaattacgtgtagctgaaatacttaaataaggagcaatttataatggctgtagaaaaagtgtaccaaccatatgacgaacaagtttataatagtataccgaagcaacaaccacaaactaagcccgaaaagaagactgtttcgagaaaagtggttgtacaattaactaaatttgaaaaagttttatacataactttgattactgtaattgctatgttaagtatttatatgctatctttaaaaatggatgcgtatgatacgcgaggaaagattgcagatttagattataaaatagataaacaatcaagtgaaaacagtgctttacaatctgaaatcaaaaagaattcttcttatgaacgcatatacgaaaaggctaagaaacaggggatgagccttgagaacgataatgtaaaggtagtgcgtagtaatggcgaagcaaaaaattaaaattaaaaaaaataaaataggggcagtcctacttgttggtttattcggactgctcttttttatattggttttaagaatttcatatatcatgattactggacattctaatggtcaagatttagtcatgaaggcaaatgaaaagtatttagttaagaatgcacaacaaccagaacgaggaaagatatatgatcgtaatggtaaagtgctagcagaagatgtagaaagatataaacttgttgcagtaatagataaaaaggcgagtgccaattctaaaaaacctaggcatgtagttgataaaaaagagactgcaaagaaattatctacagtcattaatatgaagccagaggaaattgaaaagagacttagtcaaaagaaagctttccaaattgaatttggacgcaaaggaacaaatttaacgtatcaggacaaattgaaaatagagaaaatgaatttgcctggtatttctttattgcctgaaacagaacgcttttatccaaatggcaattttgcatcacacttaattggtagagctcagaaaaatccggatactggtgaacttaaaggtgcacttggagttgaaaagatttttgatagttatttaagtggatctaaaggatcattgagatatattcatgatatttggggatatatcgcaccaaatactaaaaaagagaagcagcctaaacgtggtgatgatgtccatttaacaatcgattcaaatattcaagtatttgttgaagaagctttagatggcatggttgaaagataccagccgaaagatttatttgcggttgtcatggatgccaaaactggagaaattttagcatacagtcagcgaccaacatttaatcctgaaactggtaaagactttggtaaaaagtgggcaaatgacctttatcaaaacacatacgagcctggatcaacatttaaatcatatgggttagcagctgctattcaagaaggtgcttttgatcctgataagaaatataaatctggacatagagatattatgggttcacgtatttcagactggaatagagtcggttggggtgaaatcccaatgtcactcggatttacttattcatctaatacattgatgatgcatttacaagatttagttggtgcagacaaaatgaaatcttggtatgaacgatttggatttggaaaatcaactaaaggtatgtttgatggagaagcacctggtcaaattggatggagtaatgagttgcaacaaaaaacgtcatcatttggtcaatcgacaacagtaacacctgttcaaatgttacaagcgcaatcagcgttctttaatgatggtaatatgttaaaaccatggtttgtgaatagcgttgaaaatcctgttagtaaaagacaattttataaagggcaaaaacaaatcgcaggcaaaccaataacaaaagatactgctgaaaaagttgaaaagcaattggatttagttgtgaatagtaagaagagtcacgctgcaaactatcgtattgatggttatgaggtcgaaggtaagactggtacagcacaagtcgctgcacctaatggtggtggatacgttaaaggtccaaacccatattttgtaagttttatgggtgacgcgccgaagaaaaatcctaaagttattgtatacgctggtatgagcttggcacaaaaaaatgaccaagaagcttatgaattaggtgttagtaaagcgtttaaaccaataatggaaaatactttgaaatatttaaatgtaggtaaatcaaaagatgacacatctaatgcagagtatagtaaagtgccagatgttgaaggtcaagacaaacaaaaagctattgataatatgagtgcaaaatcattagaaccagttactatcggttctggcacacaaataaaagcacaatctataaaagcagggaataaagtcttacctcatagtaaagtactgttattaacagacggagacttaactatgcctgacatgtcaggatggacgaaagaagatgtcattgcttttgaaaacctaacaaatattaaagtaaatttaaaaggtagcggttttgtgtcccaccaatcaattagtaagggacaaaaacttactgaaaaagataaaatagacgtagaattttcatcagagaatgtagacagcaattcgacgaataattctgattcaaattcagatgataagaagaaatctgacagtaaaactgacaaggataagtcggactaacaagaatggctacattaaataagggtgtattgtcactatttgtttttactaaagtaatgctgtgatagaaaacaacatcttcatttaatctttataaataagtgttgatagagaattttaaggtagacgaggtcagattaacttgtttgttataggcaaactttttatactggcctcttatgccgtaaaaaagaaaaattataaattttgattacaactttgtttatttaattgaaaaattgataatatattagtggttaaaaaagtctggattaagaagaggagatagttatgatttttgtatatgcgttattagcgctagtgattacatttgttttggtacctgttttaatacctacattaaaaaggatgaaatttggtcaaagtattcgagaagaaggtccacaaagccatatgaagaagactggtacaccaacgatgggtggactaacatttctattaagtattgtgataacgtctttggtggttattatatttgtggatcaagctaatccaatcatactgttattatttgtgacgattggttttgggttaattggttttatagatgattatattattgttgttaaaaagaataaccaaggtttaacaagtaaacagaagtttttggcgcaaattggtattgcgattattttctttgttttaagtaatgtgtttcatttggtgaatttttctacgagcatacatattccatttacgaatgtagcaatcccactatcatttgcatatgttattttcattgttttttggcaagtaggtttttctaatgcggtaaatttaacagatggtttagatggattagcaactggactgtcaattatcggatttacaatgtatgccatcatgagctttgtgttaggagaaacggcaattggtattttctgtatcattatgttgtttgcacttttaggatttttaccatataacattaaccctgctaaagtgtttatgggagatacaggtagcttagctttaggtggtatatttgctacgatttcaatcatgcttaatcaggaattatcattaatttttataggtttagtattcgtaattgaaaccttatctgttatgttacaagtcgctagctttaaattgactggaaagcgtatatttaaaatgagtccgattcatcatcattttgaattgataggatggagcgaatggaaagtagttacagtattttgggctgttggtctgatttcaggtttaatcggtttatggattggagtgcattaagatgcttaattatacagggttagaaaataaaaatgtattagttgtcggtttggcaaaaagtggttatgaagcagctaaattattaagtaaattaggtgcgaatgtaactgtcaatgatggaaaagacttatcacaagatgctcatgcaaaagatttagaatctatgggcatttctgttgtaagtggaagtcatccattaacgttgcttgataataatccaataattgttaaaaatcctggaataccttatacagtatctattattgatgaagcagtgaaacgaggtttgaaaattttaacagaagttgagttaagttatctaatctctgaagcaccaatcatagctgtaacgggtacaaatggtaaaacgacagttacttctctaattggagatatgtttaaaaaaagtcgcttaactggaagattatccggcaatattggttatgttgcatctaaagtagcacaagaagtaaagcctacagattatttagttacagagttgtcgtcattccagttacttggaatcgaaaagtataaaccacacattgctataattactaacatttattcggcgcatctagattaccatgaaaatttagaaaactatcaaaatgctaaaaagcaaatatataaaaatcaaacggaagaagattatttgatttgtaattatcatcaaagacaagtgatagagtcggaagaattaaaagctaagacattgtatttctcaactcaacaagaagttgatggtatttatattaaagatggttttatcatttataaaggtgttcgtattattaacactgaagatctagtattgcctggtgaacataatttagaaaatatattagcagctgtgcttgcttgtattttagctggtgtacctattaaagcaattattgatagtttaactacattttcaggaatagagcatagattgcaatatgttggtactaatagaactaataaatattataatgattccaaagcaacaaacacgctagcaacacagtttgccttaaattcatttaatcaaccaatcatttggttatgtggtggtttggatcgagggaatgaatttgacgaactcattccttatatggaaaatgttcgcgcgatggttgtattcggacaaacgaaagctaagtttgctaaactaggtaatagtcaagggaaatcggtcattgaagcgaacaatgtcgaagacgctgttgataaagtacaagatattatagaaccaaatgatgttgtattattgtcacctgcttgtgcgagttgggatcaatatagtacttttgaagagcgtggagagaaatttattgaaagattccgtgcccatttaccatcttattaaagggtgtgagtattgatggatgataaaacgaagaacgatcaacaagaatcaaatgaagataaagatgaattagaattatttacgaggaatacatctaagaaaagacggcaaagaaaaagatcaaaggctacacatttttctaatcaaaataaagatgatacatctcaacaagctgattttgatgaagaaatttacttgataaataaagacttcaaaaaagaacaaagcaatgatgaaaataatgattctgcttctagtcgtgcaaataataataatatcgatgattctacagactctaatattgaaaatgaggattatagatataatcaagaaattgacgaccaaaatgaatcgaatggaattgcattcgacaacgaacaacctcaatcagctcctaaagaacaaaatggcgactcgaatgatgaggaaacagtaacgaaaaaagaacgaaaaagtaaagtaacacaattaaagccattaacacttgaagaaaagcggaagttaagacgtaagcgacaaaaacgaatccaatacagtgttattacaatattggtattgttgattgctgttatattaatttacatgttttcaccacttagtaaaattgcgcatgtaaatataaatggaaataatcacgttagtacttcaaagataaacaaagttttaggtgttaaaaatgattcaaggatgtatacgtttagtaaaaaaaatgctattaatgatctcgaagagaatccattaatcaaaagtgttgagatacacaagcaattaccaaacacattaaacgtagatatcacagaaaatgaaattattgctttagtgaaatataaaggtaaatatttacctttattagaaaatggtaaattgcttaaaggttcaaatgatgtcaaaattaatgatgcacctgtcatggatggtttcaaaggtacaaaagaagatgatatgattaaggcgttatctgaaatgacacctgaagttagacgatatattgccgaagtgacatacgccccaagtaaaaacaaacaaagcagaattgaattgtttacgacagatggacttcaagtaatcggtgatatttcgacgatatctaagaaaatgaaatattatccgcagatgtcacaatcattatcaagggatagttcgggtaaactaaaaacacgaggctatattgatttatcagtcggtgcttcatttatcccataccgtggaaacacgtctagtcaatcagaaagcgataaaaatgtgactaaatcatctcaagaggaaaatcaagcaaaagaagaattacaaagcgttttaaacaaaattaacaaacaatcaagtaagaataattaaaaaattttgatattgtctatgtttatagttcacaagccattcaacgtattgtaaactaaggatagtgtatttttttaatagtaatttgtcaggaggtgcctatctatggaagaacattactacgtaagtattgatattggatcatcaagcgtaaaaacaatagtaggcgagaaatttcacaatggtataaatgtgataggtacaggacaaacctacacgagcggtataaaaaatggtttaattgatgattttgatattgcgcgacaagcaatcaaagacacaattaaaaaggcatcaatcgcttcgggtgttgatattaaagaagttttcctgaaattacctatcattggaacggaagtttatgatgaatcaaatgaaatcgacttttatgaggatacagaaatcaacggttcacatatcgaaaaagtattagaaggtattagagaaaaaaatgatgtgcaagaaacagaagtaattaatgtgttcccgattcgttttatagtcgataaagaaaatgaggtttcagaccctaaagaattaattgccagacattcattaaaggttgaagcaggcgtaattgctattcaaaaatcgattttaattaatatgattaaatgcgtagaagcatgtggtgttgatgtattagatgtttactctgatgcatataactatggttcaatcctaacagctactgaaaaagagttaggtgcatgtgtcattgatattggtgaagacgttacgcaagttgctttttatgaacgcggtgaattagtagatgctgattctatcgaaatggcagggcgtgatattacagacgatattgcacaaggattaaacacttcttatgaaactgctgaaaaagttaaacaccaatatggtcatgcattctatgattctgcttcagatcaagatatcttcactgttgaacaggttgatagtgatgaaacagtacagtatactcaaaaagatttgagtgactttattgaagcgcgtgtagaagaaatattcttcgaagtatttgatgttttacaagatttaggattaacaaaagtaaatggtgggtttattgtaactggtggatctgcaaacttacttggcgtaaaagaattattatcagatatggtaagtgaaaaagttagaattcacacgccatcacaaatgggaattagaaaacctgaattttcttcagcaatttctacaatttctagtagtatcgcttttgatgagttattagattatgttacaattaattatcatgatagtgaagaaactgaagaagatgttattgatgtgaaagacaaagataacgaatctaaattaggcggatttgattggtttaaacgtaaaacaaacaaaaaagatactcatgaaaatgaagtagagtcaacagatgaagaaatttatcaatcagaagataatcatcaggaacataaacagaatcatgaacatgttcaagacaaagataaagataaagaagaaagtaaattcaaaaaactaatgaaatctctatttgaatgattattggccaataaaactaggaggaaatttaaatgttagaatttgaacaaggatttaatcatttagcgactttaaaggtcattggtgtaggtggtggcggtaacaacgccgtaaaccgaatgattgaccacggaatgaataatgttgaatttatcgctatcaacacagacggtcaagctttaaacttatctaaagctgaatctaaaatccaaatcggtgaaaaattaacacgtggtttaggagcaggagctaatcctgaaatcggtaaaaaagctgcagaggaatctcgtgaacaaattgaagatgcaatccaaggtgcagacatggtatttgttacttctggtatgggtggcggaactggtactggtgcagcaccagtcgttgctaaaattgcaaaagaaatgggcgcattaactgttggtgttgtaactcgtccatttagttttgaaggacgtaaacgtcaaactcaagctgctgctggagtagaagctatgaaagctgcagtagatacattaatcgttataccaaatgaccgtttattagatatcgttgacaaatctacgccaatgatggaagcatttaaagaagctgataacgtgttacgccaaggtgtacaaggtatctcagacttaatcgctgtttctggtgaagtaaacttagactttgcagacgttaagacaattatgtctaaccaaggttctgcattaatgggtattggtgtttcttctggtgaaaatagagcggtagaagctgctaaaaaagcaatctcttctccattacttgaaacatctatcgttggtgcacaaggtgtgcttatgaatattactggtggcgagtcattgtcattatttgaagcacaagaggctgctgatattgtccaagatgctgcagatgaagacgttaatatgattttcggtacagttattaatcctgaattacaagatgagattgttgtaacagttattgcaactggttttgatgacaaaccaacatcacatggtcgtaaatctggtagcactggattcggaacaagcgtaaatacttctagcaatgcaacttctaaagatgaatcattcacttcaaattcatcaaatgcacaagcaactgatagtgtaagtgaaagaacacatacaactaaagaagatgatattcctagcttcattagaaatagagaagaaagacgttcaagaagaacaagacgttaatcggttaatatatatacacaaataattcaacacaaatcatcagataacatatctgatgatttttttactaatttttagaacatgtagaaggacatttaagtttttcaaagttattaaaagtgtttaagtatcgtgtcaaaattaagtcaaaaattatttgcgcaacattttaactttaaacataaatgttatattatataattattaactttgtacagttagacgaagataatttaaatgaaatgatggtgacgatcgagtgaatgataattttaaaaagcaaccgcatcatttaatatatgaagagttattacaacaaggtattactctaggtattacaactagaggcgatggtttaagtgactatcctaaaaatgcttttaatatggcgagatatattgatgatcgcccatataatattactcaacatcaattgcaattagctgaagaaattgcgtttgatagaaaaaattgggtgtttcccattcaaacacatgaaaataaagtcgcttgtattacaaaggatgatataggcacaaatatagacactttaactgatgcgcttcatggtattgatgcgatgtacacatatgatagtaatgtcttattaacgatgtgttatgcagactgtgtaccagtatatttttatagtacaaaacatcattttattgcattggcgcatgcaggttggcgtggtacctatactgaaattgtaaaagaagtgctaaaacatgtgaactttgatttgaaagacttacatgtcgttattggaccatctacatcatcaagttatgaaattaatgatgatattaaaaataaatttgaaacattgccaattgatagtgccaactatattgaaactagaggacgagatcgtcatggtattgatttgaaaaaagccaatgctgcattattaaattattatggtgttcctaaagaaaatatttatacgacagcgtatgctacatctgaacatttagaattatttttctcttatcgattagaaaaaggtcaaacaggacgcatgttagcattcattggtcaacagtaaacaaggaggagatatgcttgcgtgtgaaagataatttacaacaaatctcaacacaaattaatgacaaaagtgaaaaaaataatttttcaacaaaaccaaacgtgattgcagttacaaaatatgttacaatagagcgagctaaagaagcgtatgaggctggaataagacattttggtgagaatagattggaaggctttttacaaaagaaagaagcattaccatcagatgcggtgatccattttataggatcattacaatctcgaaaagttaagggcgttataaacgacgtagattatttccatgctttagatcgattgagcttagccaaagaaattaacaaacgtgcagaacataaaattaaatgtttcttgcaagtgaacgtttcgggagaagcttctaaacatggtattgctttagaagatgttgatcagtttatagatgatcttaaaaaatatgacaaaatcgaaattgtaggtttaatgacgatggcaccattgacagatgatgaagcatatattagatcgttatttaaacagttacgtttgaaaaaagaagaaatacaacgactcaatttagaatatgcgccttgtgatgaattatcaatgggaatgagtaatgactatcttattgcagttgaagaaggtgcgacgtttgttagaattgggactaaacttgtaggagaagaggagtgagccacttggctttaaaagatttatttagtggattttttgtaatagatgatgaagaggaagtagaagtacctgacaaacaacaacaggtcaatgaagcgccagcaaaagagcagtcacaacaaacaacaaaacaaaacgcaatcaaatcagtccctcaaaaatctgcatcaagatatacaacaacgtcagaagaaaggaataaccgtatgtctaattattcaaaaaataattcacgtaatgttgtaactatgaacaatgctacaccaaacaatgcatcacaagaaagttcaaaaatgtgtttattcgaaccacgtgttttttcagatacacaagatattgctgatgagcttaaaaaccgccgtgcgacacttgtcaatttacaacgtattgataaagtatcagcgaaaagaattattgattttttaagcggtactgtttatgcaatcggtggagatatccaacgtgtaggtactgatattttcttatgtacgcctgataatgtggaagtagctggaagcattacagaccatattgaaaatatggaacattcattcgactaaggagttaacatatggatataaatgtgctagctacaatatttaaatttatcctttttgttgttgaaatttattatttcggcatgattatatatttctttacatcttgggtaccaagtattagagaaactaaggtaggttattttttagcgaaaatatatgaacctttcttacaaccatttagaaaagtaattccacctattggaattatcgacatatcatcaatcgctgcaattatcgttttagtattattccaaaaagggttactccaaatctttaattggattttaattcaattacaataaattaagcgacataacgaggcaagggtacatgatactttagcctcgtttttgatatgtatttttctgaatataagggcaatagatggtattttataatttttttaaggtagtgattaacatagatatttatcaacactttagacaggaagaatacgaattaattgatcagctaacggataaatgtgatcaagcggaacagcattatgcaccagtattaacgcattttttagatccaagagggcaatatatattggaagtgatttgtggcagttatgaagatttaaacgtatctttttatggtggacctaatgctgaaagaaaaagagcaatcatttcgccgaactattatgaacctaaagaaagcgactttgaattaactttaatggaaatagattatcctgaaaaattcgtcactttaaaacatcaacatattttagggacattaatgtctttaggtatcgaacgcgaacaagttggagatataattgtgaatgaacgaattcaatttgttttgacaagtagattggaatcatttattatgttagaattacaacgtattaaaggcgcatcagttaaactttatactattccagtaacagatatgatacaatctaatgagaattggaaaaatgaaagtgcaacagttagttctttaaggttagatgttgttattaaagaaatgatacgtaaatcacgtacgattgcgaaacaactaatcgaaaaaaaacgtgttaaagtgaatcacactattgttgattcagcagattttcaattacaagcaaatgatttaatatccatccaaggttttggtagagcacacattactgacttaggtggtaaaactaaaaaagataaaacgcacattacctatagaacattattcaaatagtaatgatttaaggaggataacaaatgccttttacaccaaatgaaattaagaataaagagttttcacgtgtaaagaatggtttagaacctactgaagttgctaattttttggagcaactaagcactgaaattgaacgtcttaaagaagataaaaaacaacttgaaaaagtaatcgaagagagagatactaatattaagtcttatcaagacgtgcatcaatctgtaagtgatgctttgatacaagctcaaaaagctggtgaagaaactaagcaagctgcagaaaaacaagctgaagcgattatagctaaggcagaagcgcaagctaatcaaatggttggtgacgcggtagaaaaagcacgccgtttagcattccagactgaagatatgaaacgtcaatcaaaagtatttagatcgcgtttccgtatgttagttgaagcgcaattagacttattaaaaaacgaagattgggattacttgttgaattatgatttagacgctgaacaagtgacgcttgaaaatattcatcatttgcatgaaaatgatttaaagccagatgaagttgcagcaaatgcacaaaataatgcatcaaatacatcagacaataatcaacaatccaatgattcagaaacaactaagaagtaagaattaaataaagacagacgcgtaatatacatttaacttttcacagcgaattaggtaatggtgagagcctagtaaaagcatgtatgttatatcactggctttttaatatttaaataatgtaatgagagaactctaagttgagttaataagggtggtaccgcgagcaatcgtcccttttaatttaacttagagttttttaaatttttaaggagtgaaaaaaatggattacaaagaaacgttattaatgcctaaaacagatttcccaatgcgaggtggtttaccaaacaaggaaccgcaaattcaagaaaaatgggatgcagaagatcaataccataaagcgttagaaaaaaataaaggtaacgaaacattcattttacatgatggcccaccatacgcgaatggtaacttacatatgggacatgccttgaacaaaattttaaaagactttattgtacgttataaaactatgcaagggttctatgcaccatacgtaccaggttgggatacacatggtttaccaattgaacaagcattaacgaaaaaaggtgttgaccgaaagaaaatgtcaacagctgaattccgtgagaaatgtaaagaatttgctttagaacaaattgaattacagaaaaaagattttagacgtttaggtgttcgtggtgactttaatgatccatatattacattaaaacctgaatacgaagctgcacaaattcgtatttttggagaaatggcagataaaggtttaatttataaaggtaaaaagccagtttattggtctccttcaagtgagtcttcattagcagaagcagaaattgaatatcacgataaacgttcagcatcaatttacgttgcatttgacgttaaagatgacaaaggtgtcgtagatgcagatgctaaatttattatctggacaacaacgccatggacaattccatcaaatgttgcgattaccgttcatcctgaattaaaatatggtcaatacaatgtagatggcgaaaaatatattattgcagaagccttatctgacgctgtagcagaagcactggattgggataaagcatcaatcaaattagaaaaagaatacacaggtaaagaattagagtatgttgtagcacaacatccattcttagacagagaatcgttagtgattaatggtgatcatgttactacagatgctggtacaggttgtgtacatacagcaccaggtcacggggaagatgactatattgttggtcaaaaatatgaattgccagtaattagtccaatcgatgataaaggtgtatttactgaagaaggcggccaatttgaaggaatgttctatgataaagctaataaagccgttactgatttattaacagaaaaaggtgcactattaaaattagactttattacacatagctatccacacgactggagaacaaaaaaacctgtaatcttccgtgctacaccacaatggtttgcctcaatcagtaaagtaagacaagatattttagatgcaatcgaaaatacaaacttcaaagtaaattggggtaaaacacgtatttacaatatggttcgtgaccgtggcgaatgggttatttctcgtcaacgtgtgtggggtgtaccgttaccagtattttatgctgaaaatggcgaaattatcatgacgaaagaaacagtgaatcatgttgctgatttatttgcagaacacggttcaaatatttggtttgaaagagaagcgaaagacttactaccagaaggatttacacatccaggcagccctaacggtacatttactaaagaaacagacattatggacgtttggtttgattctggttcatcacaccgtggcgtgttggaaacaagaccggaattaagtttcccagcggatatgtatttagaaggtagtgaccaatatcgtggttggttcaactcttctatcacaacttcagttgctacaagaggagtatcaccttataaattcttactttctcatggttttgttatggacggtgaaggtaagaaaatgagtaaatctttaggtaatgtgattgtacctgaccaagtggttaaacaaaaaggtgctgatattgcgagactttgggtaagtagtacggactatttagctgatgttagaatttctgatgaaattttaaaacaaacatctgatgtttatcgtaaaatcagaaatacattaagatttatgttaggtaacattaacgatttcaatcctgacacagatagcattactgaatcagagttattagaagtggatcgttacttgctaaatcgtttacgtgaatttactgcaagtacgattaacaactatgaaaactttgactacttaaatatttatcaagaagttcaaaactttatcaatgttgagttaagtaatttctatttggattacggtaaagatattttatatattgaacaacgagattctcatatccgtcgtagtatgcaaacagtgttatatcaaattttagttgatatgacgaagttgttagcaccaatcttagtgcatacagctgaagaagtttggtctcatacaccacatgttaaagaagaaagtgttcacttagcagacatgcctaaagttgtagaagtagatcaagctttattggataaatggcgtacatttatgaatttacgtgatgatgtgaaccgtgcattagaaactgctcgtaatgaaaaagttattggtaaatcattagaagctaaagttacgattgctagtaacgataaatttaatgcatctgaattcttaacttcatttgatgcattacatcaattatttatcgtgtcacaagttaaagttgtagataagttagatgatcaggcaacagcttatgaacatggtgatattgtcatcgaacatgcagatggtgaaaaatgtgaaagatgttggaactattcagaggatcttggtgctgttgatgaattgacgcatttatgcccacgatgccaacaagttgtaaaatcacttgtataattgaaattgtataaagtactcatacagatgatataaattaaagctctcttcataatcatgttgtagtttttgttgacatgatgaagagagtttttttgtgaataaaaaaatgaccaagttaccggtcatatatgtaaaaaatgtgcgatttactaaaataaaaattattcaggaatggtacaaattctctgaggcatataaatgcgttatagttgctattctcaattatgttcgcgataattttaagtaaaagtaagcacagatattgaatttgataggagttaattgaatgtatcataacagtaacgcaaactttgtcaatggtatcactttaaatgtgagagataagaatgaattaaagccattttatgaggacatattaggattaaatattataaatgagacattaacatcgatacaatatgaagtaggtcaaaataatcatgtcattacacttgttgaattacaaaatggacgtgaacctttaatgtccgaagcgggactgtttcatatcgcaattaaactacctcaaattagtgatttagctaatttactaattcatttaagcgaatatgatattccagttaacggaggtatacagcctgcttcgttatcattattttttgaagacccggaaggaaacggttttaaattttatgttgataaagacgaagcgcaatggacgaggcaaaatgatttagtaaaaattgatattagaccattaaatgtaccgagattagtgagtcatgcaacaaaattgttatggttaggtattccagatgacgctattataggtgcattgcatattaagacaattcatttatcagaggtaaaagagtactacctcgattattttggattagagcaatcggcatatatggatgattattcaatatttttagcatcgaatggctattatcaacatttggccatgaatgattgggtatcagcaacgaaacgtgtagaaaattttgatacgtatggattagcaattgttgactttcattatcctgaaacaacacatttaaatttacaaggtccggatggtatctattatcgctttaatcatatcgaagttgaagattagtatatactttgaatggacgaaccatataatgaatcgtttttaatgatctttttatacaagctatgaaggaggctgggacataaatccctaaaaaacagcagtaagataattttcaattagaaaatatcttactgctgttctctatttatacaatacttcgtattgaatggcttcgctttgcccatctggcacattactgtaaaattctataaatagaatttttgatgatgggtcccttcctagggtgccgtctcagctaccccaaccggcacattgttgtaagctgactatatgtcagcttctgtgttggggcccctgtcttcgactggcactgctccctcaggagtctcgccattaatactacgtattaacatgtaattttactttgaaatactttaaagcccaaattaatcaaaagctttctgaaccagaaacgaaaaaatctatagttaaagaaaaattgatgtagagcctgtttttggatttatgaaggctattttgggtttcactcgaatgtcagttcgaggaataaataaagttaaacgagagctaggttttgtattaatggcacttaatataaggaaaatagcagctcaacgagctgtacattataaaatacatatcaaaaaagctgatttctatcaaataattaatagaaaactgcttttttaaattgcctaagaacttaatatcccagcctgctttcctaatttttaatgtcaaaacatagtagtttatcaagtattgagtgagtaacattagatttaatgtaatatgcttactttttttattagcaggtgtaagctataatataaagagttgtctcatggacgattgattggaggaacgaaaatgcacaaaaaatattttattggcacttccattttaatagcagtatttgtcgttatatttgaccaagttactaaatatattatagctactacaatgaaaattggagattcatttgaagtgataccgcactttttaaacataacatcacatcgaaataatggtgctgcatggggaatattgagtggaaaaatgacatttttctttattattaccattattatattaatagccttagtatatttctttattaaagatgctcaatataatttgtttatgcaagttgctattagtttactttttgcaggtgcacttggaaactttattgatagaattttaacaggagaagttgttgactttattgatacaaatatttttggttatgattttccaatatttaatatcgcagattcaagtttaacaattggtgtaatattaattattattgccttattaaaggatacttccaataaaaaggagaaggaggttaagtaatggagacttatgaatttaacattacagataaagaacaaacaggtatgcgtgtagataagttgctgcctgaattaaatagtgattggtctcgtaaccagatacaagattggattaaagcaggtttagtcgttgcaaacgataaagttgttaaatctaattataaagtgaaacttaatgatcatatagttgtcactgaaaaagaagtggttgaagctgatattctacctgaaaatttaaatttagatatttattatgaagatgacgatgttgcagttgtatataaaacgaaaggcatggtagttcatccatcaccagggcattataccaatacattagttaatggtttaatgtatcaaattaaaaatttgtcaggtattaatggagaaattcgtccaggtattgttcaccgtatagatatggatacttctggtttattaatggttgctaaaaatgatattgctcatcgtgggcttgtagaacaattaatggataaatctgttaaaagaaaatatatcgctttagttcacgggaatattcctcatgattacggtacaatcgatgcgccaattggtagaaacaaaaatgatcgtcaatctatggctgttgttgatgatggtaaggaagcagtgacacattttaacgtactagaacattttaaagattatacgcttgttgaatgtcaacttgaaacaggacgtacgcatcaaatccgtgtgcacatgaaatatattggcttcccattagttggtgatccaaagtatggaccgaaaaagacattggatattggtggtcaagctctacatgctggacttattggattcgaacatccagtaacaggtgaatatattgaaagacatgctgaattaccacaagactttgaagatttattagatacaattcgaaaaagagatgcataattgtgttgtgctataattacgataacattattatgtaaactataagtatttatcgttttcgtttttttaaaatgaaaacacattataaaatagattaaggttaacatttttactgagatcggttaatttttcaatatagattgacaaagcgcctgattagtattatccttataacagtttaagtacaacataaagagtctttaattgagcgtccagagagacgtcaaagacatgaaaatatagatatatactaaaatgatcataacactttcacatatgcaagaataagtagtaatactacgattcttctatgtaaataggctgattgtatatactaaacctcatgtcgatattaaagacatgaggttttttgtttctaaattttgaaagggtgagaatatgtctgaacgtatcataatggatgatgccgcaatacaacgtacagtgacgagaatcgctcacgaaattttggagtataacaaaggtactgataatttaattcttttaggtatcaaaacaagaggtgaatatttagcgaatcgtatacaagataaaattcatcaaattgagcaacaacgtatacctactggaacaattgatattacatactttagagatgatatagagcacatgtcatcacttacgacaaaagacgcaatagacatcgacacagatattacagataaagtagtcatcattattgatgatgtgctgtatactggtcgaacggttcgtgcttcacttgatgctattttgctaaatgctagacctattaaaattggtttagctgctttggttgatcgaggacatcgtgagttaccaattcgagcagattttgttggtaaaaatatacctacttctaaagaggaaacggtaagtgtctatttagaagaaatggatcaaagaaatgcagttataattaaataataccccttttaattcagtacgagagactgaaaaaggtgggggagttgaatgataaataagttttcatatgcttgtttatctaataataccctcatgttcgacaactataagtcaatttctatggacgaaaatgacttgtagcaacttgtcacactttttgtctctttacatatactgatgtaaagagatttttttattatcggaggaaatgaatattatgcaaaatgatgaaatgtttgaacgaacagtaaaacctgtactagatgtaaatgaaaaaccacaaccagcgcaatgggcatttttaagcttacaacatttatttgcgatgtttggcgcaacagtactagtaccattcttaacaggattaccaatatccgcagcgttactagcttcgggaatcggtacattactttatatcttaataacgaaggcgcaaataccagcatacttgggatctagctttgcatttatcacgccaattatcacgggattaagtacgcatagcttaggagacatgcttgtagcattattcatgagtggtgttatgtacgtcatcatcgggattctaatcaaattaagtgggacagcatggttaatgaaattattaccaccagttgttgttggaccagtcatcatggtaattggtttaagcttagcgcctactgcagtcaatatggcaatgtatgaaaatcctggagatatgaaaggttacaatatcagtttcttaattgttgcaatgataaccttgcttgtaacaatagtcgttcaaggattttttaaaggattcctatctttaattccagtacttgtaggtattatcgtaggttatgtggtagcgatttttatggggattgtgaaatttgatgcaattatgtcagcaaaatggatagatttccctcatatttatctgccatttaaagattatgtaccttcatttcacttaggacttgtactggtaatgattccgattgtgtttgtaacagtaagtgaacatattgggcaccaaatggtattgaataaaatcgtaggtagaaacttctttgaaaagccaggacttgataaatcaatcattggtgatggtgtttctacaatgtttgccagtattattggtggaccaccaagtacaacatacggtgaaaatatcggtgtattagcgattaccagaatatacagtatttacgtcattggtggtgcagcagttatagcaattgttttagcattcattggtaagttcactgcattaatttcttctatacctacaccagttatgggaggagtatctatattacttttcggtattattgcagcaagtggcttaagaatgctagttgaaagcaaagtagattttgcgaacaatcgaaatttagttatagcttcagtaattttagttgtaggtatcggtaatttagtatttaacttaaaagaaattggtatcaaccttcaaattgaggggatggcattagctgcactttcaggaattattttgaacttaatcttacctaaagagaaaaaacaaaacaattaagatttacaaattaaggagggcgcttttatgaatcatttattatcaatggaacatttatctacagatcaaatatacaaacttatccaaaaggcaagtcaatttaaatctggtgaacgtcaactaccaaactttgaagggaaatatgtcgcaaatttattctttgaaaattctactcgaacaaaatgtagttttgaaatggcagaacttaagctagggttaaaaacgattagctttgaaacatcaacatcatctgtttcaaaaggtgaatctttatatgacacatgtaaaactttagaaagtattggctgtgatttattagtcattagacatccgtttaataactactatgaaaaattagcgaatattaacatcccaattgcgaatgctggtgatggtagtggacaacatccaacacaaagtttacttgatttaatgacgatatatgaagaatatggatattttgaaggcttgaatgtattgatttgtggagacattaaaaattcacgtgtcgcacgtagtaattaccatagtttaaaagcattaggtgcaaacgtaatgtttaatagcccaaatgcttggattgatgattctttagaagcaccttatgtaaatatagatgatgttatagaaacagtagatatagttatgttattaagaattcaacatgaaagacatgggcttgcagaagaaactagatttgcagcagatgattatcatcaaaagcatggcttaaatgaagtgcgctataacaaattacaagaacatgctattgttatgcatccggcacctgtgaatagaggagtagaaatacaaagcgatttagtagaagcttcaaaatcaagaatttttaagcaaatggaaaatggcgtttacttaagaatggcagtcattgatgaattattaaaataggtaaggggacgaaaatgatgaaattaattaaaaacggtaaagtattacaaaatggcgaattacaacaagcagatattttaattgatggtaaggtaattaaacaaattgcacctgcaattgaaccaagcaatggtgttgacatcatagatgcgaaaggtcactttgtgtcacctggatttgtcgatgttcatgttcatttacgtgaacctggtggtgaatataaagagacaattgaaactggtactaaagctgctgctagaggcggatttacaactgtatgtccaatgcctaacacaagaccggtaccagattctgtagaacattttgaagctttacaaaaattaatcgatgacaatgctcaagtacgtgtattaccttatgcttcaattacaacacgtcaattaggtaaagaattggttgatttcccagcactagtaaaagaaggtgcctttgcgtttacagatgacggtgtaggagtacaaactgcaagcatgatgtatgaaggtatgattgaagctgcaaaagtaaacaaagccatcgtagcacactgtgaagataattcattaatctatggtggtgcaatgcatgaagggaaacgcagtaaagagttaggtataccaggtattccaaacatttgtgaatctgttcaaatcgcaagagatgtactattagctgaagcagcaggttgtcattatcatgtatgtcatgtttctactaaagaaagtgttagagtcattcgtgatgctaaacgcgcaggcattcatgttacagctgaagttacaccacatcatttattgttaacagaagatgatattcctggtaataatgccatttataaaatgaatccaccattgagaagtactgaagatagagaggctttgttagaagggttactagacggtacaattgattgtatcgcaacagaccatgcaccacatgcacgtgatgaaaaagcgcaaccaatggaaaaagcaccattcggaattgttggtagtgaaacagcattcccattattatatacgcattttgtaaaaaatggtgattggacattacaacaattagtagattacttaacaattaaaccatgtgagacatttaatttagaatacggcacattaaaagaaaatggttatgcagatttaacaatcattgatttagatagtgaacaagaaattaaaggagaagatttcttatcaaaagcagataatacaccatttatcggctataaagtttatggaaatccgatcttaacaatggttgaaggcgaagttaaatttgagggggataaataatatgcaaagcaaacgttatctagtgttagaagacggttctttttacgaaggctaccgtttaggatctgataacttaactgtaggagaaattgtatttaatacagcgatgacaggttatcaagaaactatttcagatccatcatatacaggtcagatcattacttttacgtatccattaatcggtaattatggtatcaatagagacgattttgaatcattagtacctacattaaacggtattgtagtgaaagaagcgagtgcgcatccaagtaattttagacaacaaaagacacttcatgacgttttagaattgcatcaaattccagggattgcaggtgttgatacaagaagtattacgcgtaaaattcgacaacacggtgtgttaaaagctggttttactgatcgaaaagaagatattgatcaacttgtcaaacatttacaacaagtagaattacctaaaaacgaagtagaaatcgtttcgactaaaacaccgtatgtttcgacaggtaaggatctaagtgtcgtacttgtagactttggtaagaagcaaaatattgttcgagaattaaacgtcagaggttgtaacgtcacagttgtaccatatacaactactgccgaagaaattttagcaatggctccagatggcgttatgctatcaaacggaccaggtaatcctgaagttgtagaatgtgcgattccaatgattcaaggaattttagggaaaattccgttctttggtatctgtctaggacatcaactttttgcattatctcaaggagcaagctcatttaaaatgaagtttggtcatcgtggtgcgaaccatccagttaaaaatttagagactggaaaagttgatattacgagtcaaaaccatggatatgcaatagatatagattcgttaaaaagtactgatttagaagttactcatcttgcattaaatgatggtactgtagaaggtttaaaacataaaacattaccagcattttctgttcaataccatcctgaagcaaatccaggaccgtcagattcaaactatctatttgatgattttgtagcaatgatgactaattttaaggaaaaggagcgtcatatcaatgcctaaacgtaatgatatcaaaacaattttagtaatagggtctgggccaattatcataggtcaagcagctgaatttgattatgctggaacacaagcatgtctagctttaaaagaagagggatatcgagttattcttgtaaattcaaatccagcgacaatcatgactgataaggaaattgcggataaagtatatatcgaaccgttaactcatgattttatagcgcgaattatacgtaaagagcaacctgacgctttacttccaactttaggtggtcaaacaggtttaaacatggcgattcaactacacgaaagtggtgtgcttcaagataataacgtccaattattaggaactgagctaacatcaattcaacaagcagaagaccgtgaaatgtttagaacattaatgaatgatttaaacgttcctgtaccagagagtgacattgtaaatacagtagagcaagcctttaaattcaaagagcaagtgggatacccgctaattgttagaccggcatttacgatgggtggtaccggaggcggtatttgtcataatgatgaagaattacatgaaatcgtctcaaatggtcttcattatagtccagcaacgcaatgtttattagaaaaatctatcgcaggttttaaagaaatcgaatacgaagtaatgcgtgataaaaacgataatgccatcgttgtatgtaacatggaaaatattgatccagttggtattcatactggcgattcaattgttgtggctcctagtcaaacattatcagatgttgagtatcaaatgttacgtgatgtttcattaaaagttattcgagctttaggtatcgaaggtggttgtaatgttcaattagcattagacccccattcattcgattattatattatagaagtaaatccgcgtgtatcacgttcatcagcgttagcttcaaaagcaacaggatatcctattgcaaaattagctgctaaaatcgcggttggtctaacattagatgaaatgttaaatccaattacaggaacatcttatgcagcgtttgaaccaactttagactatgtgatttcaaaaataccaagatttccttttgataaatttgaaaaaggagaacgagagcttggcacacaaatgaaagcaacaggtgaagttatggccattggtcgaacttacgaagaatcattgttaaaagcaattcgatcacttgagtatggtgtgcatcacttaggattaccaaatggtgaaagcttcgatcttgattatattaaagaacgtatttcacaccaagatgatgaacgattatttttcatcggcgaagcaattagaagaggcacaacattagaagaaattcataatatgactcagattgattacttcttcttacacaagttccaaaacattattgatattgagcatcaactaaaagagcatcaaggtgatttagaatatcttaaatatgcaaaagattatggatttagtgataaaacaatagcgcatcgctttaatatgacggaagaagaagtatatcaattgcgtatggaaaatgatattaaacctgtttacaagatggttgatacttgcgcagctgaatttgaatcttcaacaccatattattatggtacatacgaaactgaaaatgaatccatagttactgacaaagaaaaaatcttagtattaggctctggaccaattcgaatcggccaaggtgtagaatttgactatgcgacagttcacgccgtttgggcaattcaaaaagcagggtacgaagcgataattgtgaataacaatccagaaacagtttcaacagacttctcaatttctgacaaattatactttgaacctttaactgaagaagatgtgatgaatatcattaatttagaaaaacctaaaggtgtcgttgtacaatttggaggacaaacagcgattaatttagcagacaaattggctaaacatggtgttaaaatacttggtacttcactagaaaatctaaatcgtgctgaagatagaaaagaatttgaagcactattaagaaaaattaacgtgccacagccacaagggaaaacagctacatcacctgaggaagcattagcgaatgctgcagaaatcggatatccggttgtagtaagaccttcttatgtattaggtggtcgcgcaatggaaattgtagacaatgacaaagagttagaaaactatatgacccaggctgtaaaagcgagtccggaacatccggtactagtcgatagatatttaactggtaaagaaattgaagttgatgcgatttgtgatggagaaacggtcattattccaggaataatggaacatattgaacgtgctggtgtgcatagtggtgactcaatcgctgtatatccaccacaaactttgacagaagacgagttagcaacacttgaggactatactataaaattagctaaaggtttaaacatcattggcttaatcaacattcaattcgttatagctcacgatggtgtgtatgttttagaagtaaatccacgttctagtagaacggtaccattcttaagtaaaattactgatattccaatggcacaattagctatgcgagcaatcattggggaaaaactaacagatatgggttatcaagaaggggttcaaccatatgctgagggtgtctttgtgaaagcaccggtatttagtttcaataaattgaaaaatgttgatattactttaggacctgaaatgaagtcaacaggtgaagtgatggggaaagatactacattagaaaaggcgttattcaaagggttaacaggtagtggtgttgaagttaaagatcacggtacagtattaatgaccgtcagtgacaaagataaagaggaagttgttaaattggcacaacgcttaaatgaagttggctataaaattttagcaacgtctggaacagctaataaattagctgagtatgacatacctgcagaagtagtaggcaaaattggtggcgaaaatgatttattaacacgtattcaaaatggtgatgttcaaatcgttataaatacaatgactaaaggtaaagaagtagaaagagatggcttccaaattagacgtactacagttgaaaatggtattccatgtttgacatctttagatacagctaatgccttaacgaatgtaattgaaagtatgacatttacaatgcgtcaaatgtaaatcaatcaaactgtatcggtggggctgtaattaaccatttacttaaagaagtttatattacagcctcattattttaatgaatttcttaatataaagggagacatatatgatgaaagatttaccaattattgcattagattttgaatcaaaagaaaaagtaaatcaatttttagatttatttgatgaatcattattcgtaaaagtaggtatggaacttttttatcaagaaggtcctcaattaattaatgagataaaagaaagaggccatgatgtatttttagatttaaaattgcatgatattcctaatacagtaggtaaggcgatggaaggactagctaaattgaatgttgatctggtaaatgttcatgctgctggtggcgtaaaaatgatgtctgaggccattaaaggattaagaaaacataatcaacatacaaaaattattgcagtaacacagcttacgtcaacaacagaagacatgttacgacacgaacaaaatatacaaacatcgattgaagaggccgttttaaattatgccaagttagcaaatgcagctggtttagatggcgttgtttgttcacctcttgaaagtcgtatgttgactgaaaagttaggtacatcatttttaaaagtaacaccaggtattagacctaaaggtgcatctcaagatgaccaacaccgtattacgacaccggaagaagcaagacagcttggttcgacgcatattgtagtcggtagaccgattacacaaagtgacaatccagtcgaaagttatcataaaattaaagaaagttggttagtataatggctaaagaaattgcaaaatcattattagatattgaagctgtaacattatcaccaaatgatttatatacatggagttcaggtattaaatcaccgatttactgtgataaccgtgttacgttaggttatcctttagttcgaggcgcaatccgcgatggtttaattaacttaattaaagaacactttcctgaagtagaagttatttctggtactgcaacagctggtattccacatgcagcttttattgctgaaaaattaaaattaccaatgaattatgttcgttcatcaaataagagtcatggtaagcaaaatcaaatcgaaggtgctaaaagtgaaggtaaaaaagtagttgtgatagaagatttaatttcgacagggggatcttcagtcacagcagttgaagccttaaaactagcaggtgcagaagtattaggtgttgtagctatctttacttacggtttgaaaaaagcagatgatacatttagcaatattcaactacctttttacactttaagtgattacagtgaattaattgaagtagctgaaaatgaaggtaaaatttctagtgaagatatccaaacattagttgaatggagagacaacttagcataatatagacactagaaggaggaattcaacaaatgaatgacaaaacatctaatgatttatatgggaagataaaacattgtaacgaatttatcaatcattcaaatgattccaatctatctagtagtcacgatgtcgacgaaagttcaacgaagcaaaaacatataaaaaataaaacaactatagaccataatgatgatttatttaaacatgtaaaggatatattacgtaaacaaggacaaatttaaaaacaaaaaagctatagtgtttaatatcaggggctgcttaaccgcatccgaatattacaaacactatagcttttattatataaaaaatttattagcggataattaactttattaaaatccaaccaattaagaatacgagtaataggactaatactggaatcacataatgtaacataacgtccctcctttaacttaattttaattgtaatcaaatttgacaataagtcaaaacattaatacctatgataagtatcatttattaacatatgtatcatatttttaatcttgcgtaatttttatcgttaactatgtgatttaatcaacaggccaataagacgtttgtcattcgtgcacataacggtacgacgcgcttttgtcattttaattatgttaagataatagtagttatagaagttcaatctataggaggcatagcatggatattccaaaaatcacgacatttttaatgtttaataaccaagctgaagaagctgttaaactatacacaagcttatttgaagatagtgagattataacaatggctaagtatggtgaaaatggacctggtgatcccgggactgtacaacactcaatatttacattaaatggacaagtattcatggcgattgatgctaatagtggcacagaattaccaatgaatcctgcgatttcattatttgttacagtaaaagatactattgaaatggaacgactatttaatggattaaaagatgaaggtgccattttaatgccaaaaacgaatatgccaccatacagagagtttgcttgggttcaagataagtttggagtaagttttcaattagcattacctgagtaaaaggattcgcacagcgttgaatgataaagaaacactttttcttatgcatgcgttttacctatgtatttctattttaagtacacattagcattttagtttcactcatttttaaaatcacaaagataatttgtaacttaaatgatgatacgttatttaaaaacacgatacttcgtttcaatgaacgcattaaataataaataaacacctcaccataagaaaggactactttcttttgtgaggtgtttatttgtcgacaacttgattatgattgtttcattttttgaataagttcataatcaggtgtagcatacaaagttttttgattgtcatatgttacaaacccaggctttgcacctgatggtttgtgcacatttttaattaatgtgtaatcaacaggtatttgtccagaattaccagcttttgaaaagtatcctgctaacatagccgcttccttgattgtcgtatcacttggtgcatcattaaatataacgacatgtgaaccaggaatatcttttgtgtgtaaccatgtgtgagtttttttagcttttttatttgttaaataatcattttgcttgttattcttgccaacatatatatcgtcgccatcagttgatacataatgttgtaattgaatctgcgctttctttttcttagtttgatttttacgctgtttcataaagccttgttctgctaattcatctctaatttcatcaatgtcatggacagaaatatgatgtaattgttgttcgattgttgaaaaataatctatattgtctttcgtcaattgaatttgatgttgtaattcacgttctctcgttttcatacgattatattgtttataataatattgagcatttgctgatggggattttgtaggatttaaaggaatgacaacttcttcattcgtataataattcaatgccgtcacttctttatcgccttgcttaattcgatatatattagcagtgatcaattcaccatataactgttcagtatctttatttttagactgctcatattcttcaatcaacttcgctaatttattttgatatttgtgcaactgctgttgaacaaatcgaactaaatcattcgcacgttgtttaacgcgttcacgttcgccacgcgcatcataaaaacgatcaagtaaatcatttaatgaatcgtatgtaactgtatcatcattaaattgatttaactttataaaatagaaatcctctttacctgtttcatgatttttatgaaaaataggagtaggtggtaacttggtttctgccattacttcgtcaaatgcttctggtaatgttgatgaagtcataaattgacgacgactaacaatttcattcgtaattaaagggctaaatccttcaaactgattcaataattgtttagcaatattacctgcgttaaaatcgatatatttcaacacctctgcacctgtaatatcatacggatttattttgtgctgagtaggtggtgcttcataattaaatcctggcattactgtacgatagtgattcgtatttggtgttaagtgtttaaatccttcaattattttgcgattttcatctactaaaattaagttactatgtttacccataatctcaaggatgacagtgcggtaaatagtatcgccaatttcatctttactctttatttcgatttcaatgcgacgatcattaccaatttgcttaatcgatttgataataccaccttctaagtgttttctaaaaacacgcgcaaacatgggtggattaaatggattatcatattttttagtagttaattgtaatcttgaaaagtttggatggattgacaataacaattgatggttttgtctattttgacgtacaaccattagtatcgtgtcattatcaggttgattgattttgtgaacgcgtcctgttgttaaaaattgtagagactcaaccattttctttgtaaataagccatcataagccataatttatcttccaccttcttcatatcattcgtttcattttaacatgattgtaacttttcggtatagttattgaaccatacattatgccttacattttacattatctaaaagtttgcaattcaatttatttaattaaaattaatcgtgcaatataacgatattgttagacttaatagaaattatggcatgcaatttcaaatatgctatacaatataaagaacaatgtgatatcatatttaaataatagaagattagcttagagaggtcgtaaggcatggataatgaaaaaggattgttaatcgttttatcaggaccatctggagtaggtaaaggtactgttagaaaacgaatatttgaagatccaagtacatcatataagtattctatttcaatgacaacacgtcaaatgcgtgaaggtgaagttgatggcgtagattacttttttaaaactagggatgcgtttgaagctttaatcaaagatgaccaatttatagaatatgctgaatatgtaggcaactattatggtacaccagttcaatatgttaaagatacaatggacgaaggtcatgatgtatttttagaaattgaagtagaaggtgcaaagcaagttagaaagaaatttccagatgcgctatttattttcttagcacctccaagtttagaacacttgagagagcgattagtaggtagaggaacagaatctgatgagaaaatacaaagtcgtattaacgaagcgcgtaaagaagttgaaatgatgaatttatacgattacgttgtagttaatgatgaagtagaacttgcgaagaatagaattcaatgtattgtagaagctgagcacttaaaaagagagcgcgtagaagctaagtatagaaaaatgattttggaggctaaaaaataatgttaaatccacctttaaaccaattaacgtcacaaattaaatcaaagtatttaattgcaacaactgcagcgaaaagagcgcgtgaaattgatgaacaacctgaaactgaattattaagtgaatatcattcatttaaaccagttggtagagcgttagaagaaattgctgacggtaaaattcgccctgttatttcaagtgattattatggtaaagaatagtttcgaccattaaaaatatgtgaagctagacgtacatcaaatacgtcaaggcatatccaaatcaaacgcacctatgtaggtgtgtttttttagtttatccaatgattgatgttataataatactaaatttgtatctataaaaaagtaatgagcatttgtgcgcatatgatgatgtaaagcgtaaatgtcatagtgatatttaagggagattgaatatgaagaaaatattattagccgttacaggtggcattgcggcatataaagcaattgatttgacaagtaagttaacacaatctgggtatgaagttcgcgttatgttaacgaatcacgcacaaaaatttgtgacaccattagcatttcaagcaataagtcgaaatgctgtttatacagatacttttatagaagaaaatccttcagaaatacagcatattgcattaggtgattgggcagatgcaatcattgttgcacctgcaacggcaaatacaattgcaaaattgagtgtaggtattgctgatgatttggtgacatcaacgttgctagcaacagagacaccgaaatttattgcgcctgctatgaatgtgcatatgtatgaaaataaacgtacgcagcaaaatattaatattttaaaagaagatgggtatcattttatcgaaccaggaagcggatttctagcatgtggttatgttgctaaaggacgtatggaagaaccgcttcaaatcgtttctgtaattgatgctcattttcaaaatagtaatcgtttagctaatagttcatttcaagataaacgcgcattggttacagcaggaccaactattgaagttatcgatccagtcagatttgtatccaatcgttcttctggaaaaatgggttatgcaatagctgaagcattgcgaaatcgaggagctatcgtgacgttagttgctggtcctacaacactagaggatccaaaagatattgaagttattcatgttcaaagtgctgaagaaatgtttgaacaagtgacaagccgatttgacgaacaagatattgttgtaaaagcagcagccgtatctgactatacaccggttgatgtattagaacataagatgaaaaagcaggatggtgatttgtcagtatcttttaaacgtactaaagacattcttaaatatttaggtgaacataaaacatcacagtatttaataggctttgcagcagagactgaagatattgaaaattatgcacaacaaaaattacgcaagaaaaatgcagatgtgattatttcaaataatgttggggatatgtctatcggatttagttctgatgataatgaattgacaatgcattttaaaaataatgaaaaggtaaatatcaagaaaggaaaaaaagtagtattagctgcacaaattttagatgaactagaaactaggtggcaataatgatagcgaaagtcatagtcgatgtcgcgtcgaagagcgttgactataaatttgattatataattcccgaacaactcgaatctgtcatccaacctggtgtgcgtgtaattgtaccttttggaccaagaacgattcaaggttatgtaatggaagtaacagcagaacctgatgcacaacttgacgtttcgaagttaaaaaaaatcatagaagtgaaagatatacaaccagaattaacatcagaattaatagctttaagtgagtggatgggttcaactcatgtcattaaacgtatttctatgctagaagtgatgcttccgagtgctattaaagcgaagtataaaaaagcatttaagatgaaagatgacatagagctaccttcagctttattacaaaaatttgataagcatggttactattattataaagatgcgcaaaaaaataatgatattcaattgcttatgaagttgttaaaagatgatatcgttgaagaaaaaacgattctcacacaaaatataactaaaaaaaccaagcgtgctgttcgtgtcattgaagggtatcatcctgatgaagtattagctaagttggagaaagttattaaacaatacgatttgtatgcttacttgtctgaagaacaacataaaacaatatttttaactgatattgaggatatgggcttttcaaaatccagtttagatggacttatcaaaaaaggttatgttgaaaaatatgacgcggttgttgaaagagacccatttaaagatcgtgttttcgaacaagaatcaaaacagcaattaacagaagaccaatataaagcatatgaagcgattaaagctaaaattgtaagccaagagcaagaaacatttttacttcatggtgtgacgggatcaggtaaaacagaagtatatttacaaacgatagaagatgttttaagccaaggaaaacaggcgatgatgttagttcctgaaatcgctctaacaccgcaaatggttttacgcttcaaacgtcgatttggtgatgacgttgctgtattacattctggcttatctaatggggaacgttatgatgagtggcaaaaaattagggatggtcgtgcgagagtaagtgttggtgcaaggtcaagtgtgttcgcacctttcaaaaatttagggttaatcatcattgatgaagaacatgaatctacatataaacaagaagattatccgagatatcacgctagagaaattgcccaatggcgaagtgaatatcatcactgtccagtcattttaggaagtgcaacaccatgtcttgaaagttatgcacgagctgaaaaaggcgtttatcatttgctatcattaccaaacagagtgaaccaacaagctttacctgaaattgatatagtagacatgcgtgaagaattgagtgaaggtaatcggtcaatgttttcaaaagatttacgtgaagccatacaattaagattagatcgacaggaacaagttgttttatttttaaatcgacgtggttatgcatcgtttatgttatgtcgggattgtggatatgtaccgcaatgtccaaactgtgatatttcattaacgtatcataaaacgacagacttattaaaatgtcactattgtggttaccaagagacgccaccgaatcaatgtccaaattgtgagagtgaacacattcgacaagtaggtactggtactcagaaagttgaagaactattgcaacaagaatttgaagatgcgcgcataattaggatggatgtagatacaacctcaaagaaaggtgcacatgaaaagttattgactgaattcgaaaaaggtaacggtgacattttactaggtactcagatgattgcgaaaggattagattatccaaatattactttagttggtgtgctgaatgcagatacaatgttaaatttacctgattttcgggcgagcgaacgtacttatcaactattaacgcaagtggctggtagagctggtcgtcatgaaaaggcaggtcaagtcatcattcaaacgtataatccagatcattattcaatattggatgttcaaaaaaatgattatttaacattttatcgtcaggaaatggaatatcgtaaattaggaaagtatccaccgtattattatttgattaatttcacaatctcacataaagaaatgaagaaggttatggaagcatcgcagcatgttcataaaattttattacagcatttaacagaaaaagcgcttgtactaggtccatctccggcagcacttgcgagaatcaacaatgaatttagattccaaattttagtgaaatataaaagtgaacctggattattacaagccattcagtttttagatgactattaccatgaaaaatttataaaagaaaaattagcattgaagattgatattgatccacagatgatgatgtaattttttgactaaaacactttaatatcaatgtttcctaagagtatgaaaggtcttgtttttactttaagtacagaaaaagggcagaatatacaactgttaaccatttaaattagcagtttatattctgtctttttatatggctttataacttacgtgattttgatttgattaggaatttattagtattttcatttacgaattctgattttaatgtaggtgccatacttactgatgaataaaagtactaatgattaaacaaactatttttaaatggcaaattgaaatagtgcaaattttacacttataaattaatggctataaactattttatatctatctatgttttaactacttaaattattagacaaaacaattttcttaaattatcaattaaagtatttaaaaatattgatggttaatgtaaaatatcaatataaataagttttttaaatttatgtatgtttatttgattcaaacaaaataacttaagaggagaaagtttatgaaaaagacactgggatgtttacttttaattatgcttttagtcgtagcaggttgttcttttggtgggaatcataaattatcatcaaagaaatcagaagaatcaaaacaagaaactgtaaaaaaagaatcggaagaagagaaagatccagatttagagaaatatgaagaaatagagaagaaaatgaaaggaattaaagatgcgccatctcttgataagttggatccattaatgacagaaaagtcgtttacgaatagtaaagggattcaaggatggaaagattacaaagaattaatgggtaaagtggaacttgcagattatagatttactaaagattcaaaaggatcttcaataaaagatgttgatgcattctttaaaggtaagaaaggtataaaaaggaaagtgattgaaacacacgatgatgtaaaacaagttgattattggtatgtagatccagatggaaagaaaattggcaattcaaacacacctgttttttacgcagaaattatgacaaaatataaagatggaaagttagtttatgcatcagtcgaaccaggatcttacgtaatacataaagatgatgcaattaaatatgacgattattctaagttaaaaaaattaagtcagctaactaaacttgatcatccaaaaccagttccatatagcgtagctcaaatcaaatctttcggagtacctttaacaagcgtttcatttatgacacatggatcaaaggatactaaagatgaagtgttgccggcattggcctatttcactttttcaccaaaaaattatgaagacaagtctaatccagatccaaaagttttaaatttagtacatatggatttcttaaatgcatctagtgattttggtaacgcacattttgttgttttaagtaaatatattaaagagtatgaatcaaactatgaaacagcgtcagatgattctttaaaatagtatttactgtgtgaaaaataaatagtgtactacattaaataatcgcaataataatcccgataaacaatcagcattactgcttatcatatagagttcgtaataactataactctatgattcgcaaataataaatgattgtcatcgggatttatttttatcaatttataaagtgacattaccttgttcatcagcaggtttgaaaacagtaatcactgcactaataattgctaaaatgtgtgggatacctgtccaacagaatattaagtgtagaataccttgcatattcttgccggcataaaatttatgaataccaaaactacctaagaacaatgctaataaaatataaataactttgtttacttgcatttctttccctccagttgaattgcttataatgacattagcttctctttttattatacccacttttagttcaaacattctagtttaagcattcccaatcatctaaatttcagttattcaatccttacaataaatttaggattacacttcagttgcattgtattattttacgtgtgaaatatacgtaatgaatcacatgacaatctttaaattgaaaaatatacattctatgatgtaaggtcgcatttttaatatatttacgttataatggtttgatgaattttattgaggagtaagagctatggcgattaaaaagttagtaccagcatcgcatcctattttaacgaaaaaagcgcaagcagttataaaatttgatgattcgttaaaaagattattacaagatttagaagatacaatgtatgcacaagaagcagctggcttatgtgcacctcaaattaatcagtcattgcaagtggcaatcattgatatggaaatggaaggattattacaacttgttaatccgaaaattattagtcaatcaaatgaaacgataacagacttagaaggttcaattacattgccagatgtttacggcgaagtgacaagaagtaaaatgatagttgtcgaaagttatgacgtcaatgggaacaaagttgaactaactgcacatgaagatgtagcaagaatgattttgcatattatagatcaaatgaacggtatcccttttacagaacgtgcggaccgtattttaacagataaagaagtggaggcatattttataaatgactaaaataatatttatgggtacaccagacttttcaacaactgttttagaaatgcttattgcagaacatgatgtcattgcagtcgtaacgcaaccagatcgacctgttggacgtaaacgtgttatgacaccaccaccagttaaaaaagttgcaatgaaatatgatttacctgtatatcagcctgaaaaattaagtggatcagaagaattagaacaattgcttcaattagatgtagatttaattgtaactgctgcttttggacaattattacctgaatcattgttggcattaccaaaacttggggcaattaatgtacatgcatcattgttaccgaagtatagaggtggtgcaccaattcatcaggcaattatcgatggtgaacaagaaaccggcataacaattatgtatatggttaaaaaattagatgcgggtaatattatttcgcaacaagcaattaaaatagaagaaaatgataatgtcggtacgatgcatgataaattaagtgtattaggggcagatttattaaaagaaactttaccatctattatagagggcacaaatgaaagtgtacctcaagatgatacgcaagcaacatttgcttccaatattcgacgcgaagatgagcgaattaactggaataaaccaggaagacaagtgtttaatcaaattcgtggattatcaccatggccagttgcttatacaactatggatgacactaacttgaaaatatacgatgctgaactcgttgagactaataagataaacgagcctggaaccattatagaaacgactaaaaaagccattattgttgctacaaatgataatgaagctgttgcaattaaagatatgcaattagctgggaaaaagagaatgttagctgccaattatttaagtggtgcgcaaaacacactagtagggaagaaacttatatgatagaaaacgtgagaagtcttgcttttgacacgattcaagatatattaaatgaaggtgcgtatagtaacttgcgtatcaatgaagtgttgtcagaaaatgaattaaatgcaatggataaggctttatttacagaaattgtctacggaaccgttaaaagaaaatttacgttagatttttatttaaagccttttgtgaaaacaaaaattaaggcatgggttaggcaattattatggatgagtatttatcaatatgtttatttagataaagttccaaatcacgccatcattaatgaagcagttgaaatagcaaaagaacgcggtggctatcataatggtaatgtcgtaaatggtattttacgtacaatgatgcgtagtgacttacctgattttaatgaaattgcagatcctaaaaaaagaatggcaatcgagtatagtatgccgaagtggattatagatcattgggcaacacattatggtctcgaaaaaactgaaacaattttacagtcatttttagaaacgacatcaacaactgtgcgtgccaacctgacgcgagcatcattagatgatattattgaaaagttgcaagacgaaggttatgacgttgaaaaagatcatgacttaccttattgtctccatataggaggacaaccaattattcattctcgttcatttaaagatggattcgtttcaattcaagataaaagctcaatgtttgttgcacacattatgaatgtagaccgacatgatcacgtattagatgcatgtagtgcacctggcggtaaagcttgtcacattgctgaagttttaatgccagaagggcaagttgacgcttcagatatacatgatcacaaaatagacttaattaattttaatataaaaaaattacgattaacaaatattaaagcttttcaacatgatgcgacaaaaccttatgataaaacatacgataagatacttgttgatgcaccatgtagcggattaggtgtaatgagacataagccggagattaagtatactcaaagcaaacaacatattgagtcactagttgaattacagcttgaaatattggaaaatgtaaaaaacaatgtaaaaataggtggcgaaatcatctattcaacatgtacaattgagcaactagaaaatgaaaacgtgatttatacgtttttgaaaaataataaaaacttcgaatttgaaccgtttcaacatccgataactggagagttggtcaaaacgttacaaatcatgccgcaagactttaattcagatggattctttatcactaagataaaaagaaaggacaattaggaatgataactgctgaaaagaaaaagaagaataaatttcttccaaattttgacaagcaatcaatatattcattgcgatttgacgaaatgcaaaactggctcgttgaacaaggtcaacaaaaatttcgagcgaaacagatttttgaatggttatatcaaaaaagagtagattcgattgatgaaatgacgaacttatcgaaagacttacgacagcttttaaaagataactttactgttacaactttaacaactgtagtaaaacaagaaagtaaagacggtacaattaaattcttatatgaattacaagatggctatacaattgaaactgttttaatgagacatgattatggaaattcagtatgtgtaacgacacaagtaggttgtcgtatcggatgtacgttttgtgcttctacacttggcggcttaaaaagaaaccttgaagctggcgaaattgtttcacaagttttaacagttcaaaaagcccttgatgctacagaagagcgcgtatctcaaattgtcataatgggtatcggtgaaccatttgaaaattatgatgaaatgatggactttttaagaatcgtcaatgatgataatagtttaaatattggtgcacgtcacattacagtatcaacatcaggtatcattcctagaatatacgactttgcggatgaagatatccaaattaattttgctgtaagcttacacgccgcaaaagatgaagtgcgatcacgcttgatgccaattaaccgtgcatataatgttgagaagttaatcgaagcaattcaatattatcaagaaaaaacaaatcgtcgtgttacttttgaatatggtctgtttggtggtgtgaatgaccaactagaacatgcaagagaattagcacatttaataaaaggcttaaactgccatgttaacttaattcctgtcaaccatgttccagaaagaaattatgtgaaaacggctaaaaatgatatctttaaatttgaaaaagaattaaagagactaggaattaatgccacaatacgtcgtgaacaaggttcggatattgacgcagcttgtggtcaattaagagcaaaggaacgacaagtagaaacgaggtaaagacaaatgctagaggcacaattttttactgatactggacaacatagagataagaatgaagatgcgggtggtattttttataatcgaactaatcaacaacttttagttctgtgtgatggtatgggcggccataaagcaggagaagttgcaagtaaatttgttacagatgagttgaaatcccgttttgaagcggaaaatcttatagaagaacatcaagctgaaaattggttgcgtaataatataaaagatataaattttcagttatatcactatgcacaagaaaatgcagaatataaaggtatgggtacaacatgtgtttgtgcacttgtttttgaaaaatcagttgtgatagcaaatgtcggtgattctagagcctatgttattaatagtagacaaattgaacaaattactagtgatcactcatttgttaatcatcttgttttaacgggtcaaattacgccggaagaagcatttacacatccacaacgtaatattattacgaaggtgatgggcacagataaacgtgtgagtccagatttgtttattaagcgattaaatttttatgattatttattattaaattcagatggattaactgattatgttaaagacaatgaaattaagcgtttgttagtaaaagaaggtacaatagaagatcatggtgatcaattaatgcaattggcattagataaccattcgaaagataacgttactttcatactcgcggctattgaaggtgataaagtatgataggtaaaataataaatgaacgatataaaattgtagataagcttggcggcggtggcatgagtaccgtttatcttgctgaagatacgatacttaacattaaagttgcaattaaggcgatttttataccacctagagaaaaagaagaaacattaaaacgttttgaacgagaagtacataactcatcacagctatcacatcaaaatatagtaagtatgatcgatgttgatgaagaagatgactgttactacttagtaatggaatatattgaaggtccgactttgtctgagtatattgaaagtcatgggccattaagtgttgacacggcgattaattttacgaatcaaatattggatggtattaaacatgcgcatgatatgcgtattgtacatagagatattaagccacaaaatatattaattgacagcaataaaacgttgaaaatatttgattttggaattgctaaagctttaagtgagacgtctttaactcagactaatcatgtgttaggtactgtgcagtacttttcgccagaacaagcaaaaggtgaggcaacggatgaatgtacagatatttattctataggtattgtgttatatgaaatgcttgttggtgaaccaccctttaatggagaaactgcagttagcattgcgattaaacatattcaggattctgtgccaaatgtgacaacagatgtacgtaaggatattccgcaatctttaagtaatgtcattttacgcgctacagaaaaagacaaagcgaatcgttacaaaacaattcaagaaatgaaagatgatttgagtagtgttttacatgaaaatcgagcgaatgaagatgtctatgaactcgataaaatgaaaacgatagcggtacctttgaaaaaagaagatctagcaaagcatattagtgaacataagtcgaatcaacctaaacgtgaaacgacgcaagtacctattgtaaatgggcctgctcatcatcagcaattccaaaagccagaaggtacggtttacgaaccaaaacctaaaaagaaatcaacacgaaagattgtgctcttatcactaatcttttcgttgttaatgattgcacttgtttcttttgtggcaatggcaatgtttggtaataaatacgaagagacacctgatgtaatcgggaaatctgtaaaagaagcagagcaaatattcaataaaaacaacctgaaattgggtaaaatttctagaagttatagtgataaatatcctgaaaatgaaattattaagacaactcctaatacaggtgaacgtgttgaacgtggtgacagtgttgatgttgttatatcaaaaggccctgaaaaggttaaaatgccaaatgtcattggtttacctaaggaggaagccttgcagaaattaaaatcgttaggtcttaaagatgttacgattgaaaaagtatataataatcaagcgccaaaaggatacattgcaaatcaaagtgtaaccgcaaatactgaaatcgctattcatgattctaatattaaactatatgaatctttaggcattaagcaagtttatgtagaagactttgagcataaatcctttagcaaagctaaaaaagccttagaagaaaaagggtttaaagttgaaagtaaggaagagtatagtgacgatattgatgagggtgatgtgatttctcaatctcctaaaggaaaatcagtagatgaggggtcaacgatttcatttgttgtttctaaaggtaaaaaaagtgactcatcagatgtcaaaacgacaactgaatcggtagatgtaccatacactggtaaaaatgataagtcacaaaaagttaaagtttatattaaagataaagataatgacggttcaactgaaaaaggtagtttcgacattactagtgatcaacgtatagacattcctttaagaattgaaaaaggaaaaacagcaagttatattgttaaagttgacggtaaaactgtagctgaaaaagaagtcagctatgatgatgtataaatataattgaagtaaatgtaccgaggtttctatttggaagtctcggtatttttatgttgagattgcggtagttttaaaatgcttcatgtcatcatatacaggtgagcattgtctatcaattctgtatcactctcacaatatttatatcatttgaaatgatcatttatatattaattttccagtctttgatataataaatgcagtaaaattaatcgagaggtgccattttgaagacaggtcgaatagtgaaatcaattagtggggtatatcaagtagacgttaatggcgaacgtttcaatacaaaaccacgaggattatttagaaagaaaaaattttcaccggtagttggtgatatagtggaatttgaagtacaaaacattaacgaaggctatattcatcaagtgtttgagcggaaaaatgagttgaaaagaccacctgtaagtaatatagatacactagtaattgtaatgagtgctgtcgagccaaatttttcaacgcaattattagatcgatttttagttattgcacattcgtatcagttaaatgcgagagttttggtgactaaaaaagataaaacaccaattgaaaagcagttcgaaattaatgagttgttgaaaatatatgaaaatattggctatgagactgaatttattggaaatgatgatgatcgaaaaaaaattgtagaagcttggccagctggacttatagtacttagtggtcaatcaggtgtcggtaagtccactttcttaaatcattatcgtccagaacttaatcttgagacaaatgatatatcaaaatcattaaatcgaggaaagcatactacaagacatgtcgaactattcgaacgtcaaaacggttatattgcagacacacctggattcagtgctttagattttgatcatatagataaagatgaaataaaagattattttcttgaattaaatcgatatggtgaaacatgtaagtttaggaattgtaatcatatcaaagaacctaattgtaatgttaagcatcaattagagatagggaatattgcgcaatttagatacgaccattatttacaactatttaatgaaatttcaaatagaaaggttagatattaaatgacaaaactatatccatcattattatctgttgattttttggatttacaacatgaattaaaacgacttgaagaagcaggtgtcgacggagttcattttgatgttatggatggtcaatttgtgcctaatatatctattggtttaccaatattagatgcagtaagaaaaggcacaacattacctatagacgtacatttgatgattgaaaatccagaaaagtatattgcatcatttgcagaacatggtgccgatatgatttcaattcatgtcgaatcaacgcctcatattcatcgtgctattcaaatgattaaacatttagataaaaaagctggtgtagtaattaatcctggtacaccaatatcacaaattgaacctattttagacattgttgattatgtactagtgatgacagttaacccagggtttggtggtcaatcatttattgatcaatgcgtagaaaaaatagcgggtcttaatgctattaaaatggaacgtcaattaaactttgatattgaagttgatggaggcgtaaataccgatacagcgaaagtttgtgttgaaaatggtgctacaatgctagtaacaggttcatttttctttaaacaagaggattataaaaaagtcacacaagcattgaaaggttgagtgtatatgcatataaatttattatgttctgatcgacacttgccgcaagatatttgggccaaaagtaatgaaggtaaatggggcggcgttgatagaggtgctttgattttattgaagcatcaaattatcccttttttctcagtgggagactttgattcagtcagtaaagaagaacgccaacttctaacagaacagttacaaatcaaaccagttcaagctgaaaaagctgatacggatttagctttagcggttgataaagctgttgcacttggatttgatagtattacaatttatggtgcaacaggcggacgattagatcacttttttggggcaattcagttattattgaaaaaagcatattataaacatgatgttcatatagaagttatcgatcaacaaaataaaattgaattattgcctaaaggtcaacatacagttgaaaaagataagagttatccgtacatttcatttataccgatgactgatgatgtagaactttctctagcaggttttaaatataatttagctagacaaatgcttaatataggttctactttaactatttcaaatgaaattgagtctttgcaagcgaaagtaactgtacatgatgggttgattttgcaaattagaagtacagatttaaattaagtatattcaaatttgtgaggatttttaataaagtgcatgagttatttaataaagtgacgtttatagatagaatttataacataataatagatgaatcacgctgtaattaatgaagattatggcgtgatttattattgaaaggaaaattgtaggtcctagtacattgatttatgtgccaaaatcgatattgaacccataagtccaatttgacagagaaccattattaaacgtattaaccaaattatattgatagttcgaatttcactatgaaccattatgtattgtttggtaacaaaaaaagaactaagaggttgagctcttagttcttaagtaaatgtgtcctccacataaggtcacattttttatgtgcaatatatttattaaactctagttactttaccagattttaaagcacgtgcagaaacccaaacttttttaggtttaccgtcaactaggattctaactttttgaaggttagcgttccatctacgtttagtagagtttaaagcgtgtgaacgtctgttaccagtcgaagctttacgacctgttacgaaacattgtttacccatatgagtacctcctttaataaatataaatacacataactacttatatacttaattaagatagcatagtttcatttgaaaaacaatgaataattttcacataaaagtcaaaaatactgagttttgtgatataattgtagactgtgaagttatgtagtatgatattttagagaaataagtgaatgaaacatttaaaatttttatttaatgatactacatctattaaaagaaaacgcctatagataatcgtcatgagtgtaaattcagtttactcaaaatataataggtgatttaagcgtaagtcattctgataagttgtaccattgatattttataaaaataatcaatgaaacttaaagcgtttatgactacactaagtggtaaaattttaaaagtgattagggaaaacgaataataaactttgaaatttaggagggacaaagatatgacattagagatttcaaatgattacggtaaaattgatatttcaaacgaagtgattgcttcggttgtaggtggaaaggccgttgaatgttatggtattgtaggtatggcatctagacaacaagttagagatggtattgcggaaatactaggacatgaaaattatgctaaaggcatcaaagtaactgaaaataatggcgtagtggatatagatatgtacattattgtaagttacggtgtgaaaatatctgaagttgccaataatgtacaatcaacagtgaaatatactttggaaaaatcacttaatgtatcagtaaattcaatcaatatatatgtacaaggtgtacgtgtgaataatacaggcaagaaagcttaggaggacaacttgaaatgattagcaaaattaatggtaaattatttgccgatatgattatacaaggggcacaaaatttatctaacaatgcagatttggtagattctttgaatgtgtatccagtgccagatggtgatacaggaacaaatatgaatcttactatgacttcaggtcgcgaagaagtagagaataatttgtcgaaaaatatcggcgaattaggtaaaacattctcgaaaggtttactaatgggtgcaagaggtaactctggtgtcatcttgtcacaattattcagaggattttgtaaaaatattgaaagtgaatctgaaattaattcaaaattgttagctgaaagttttcaagctggtgttgaaacggcatataaagctgttatgaaaccagttgaaggtacaatacttacagttgcaaaagatgctgcgcaagctgcaatagaaaaagcaaataatactgaagattgtatagaattaatggagtacattattgtaaaagccaatgaatcacttgaaaacacaccaaacttattagctgtacttaaagaagttggtgttgttgatagtggcggtaaaggtttgttatgcgtttacgaaggattcttaaaagcgcttaaaggtgaaaaagttgaagccaaagttgcaaagatagataaagatgaatttgtacatgatgaacatgatttccatggtgtaattaatactgaagatattatttatggctattgtactgaaatgatggttcgttttggaaagaataaaaaagcctttgatgaacaagaattcaggcaagatatgagtcaatttggtgattctttattagtcattaatgatgaagaaattgtgaaagttcacgtgcataccgaatacccaggtaaagtgtttaattatggtcaacaatatggtgaattaattaaacttaaggttgaaaatatgagagaacagcaccgtgaagtgattcgaaaagaacagcacacagctaaaccgaaaatggaaacggttgaaacagcaattattactatttctatgggtgaaggtatttcagagatattcaaatcaatgggtgccacacatatcattagtggtggacaaacgatgaatccttctacagaagatatcgttaaagtcattgaacaatcaaaatgtaaacgtgcaattattttaccgaataataaaaatattttaatggcaagtgaacaagcagcgagtattgttgatgcagaagcagttgttattccaacgaaatctattcctcaaggtataagcgcactattccaatatgatgtggacgcaacacttgaagaaaataaagcgcaaatggctgattcagtaaataacgttaaatctggttcattaacgtacgctgttcgtgatacgaaaattgatggcgttgagattaaaaaagacgcgtttatgggcttgattgaagataagattgtaagcagccaaagtgatcaattaacaacggttactgagttgttaaatgagatgttagcagaagatagtgaaatattgactgtgattattggtcaagatgcagagcaagcagttacagataacatgataaactggatcgaagagcaatatccagatgtagaagtggaagttcatgaaggtggacaaccaatttatcaatatttcttttcagtagaataaaaatttaaaataaaaaactaccaatgataaatcatcagttggtagttttttattttgctattttagtgttattgcgggttaaaagtatcattctcgagttgctaacaatgtcatgttcaacttagtcatgataaaataaataacatactaaatgatacgtaaaatcaaataaaacataggtgatttattttggctaaagtaaacttaatagaaagtccatattctcttttacaattaaaaggtataggtcctaagaaaatagaagtattgcaacaactaaatattcatacagtggaagatcttgttctttatttgccaactagatatgaagataatacagtgattgatttgaatcaagcagaagatcaatctaacgttacgatagaaggacaagtatatacagctccagtagttgcattttttggaagaaataattcaaaattaaccgttcatttaatggtaaataatattgctgtcaaatgtatttttttcaatcaaccgtatttaaaaaagaaaatcgaattaaatcaaactataactgttaaaggtaagtggaatagagttaaacaggaaattactggtaatagggttttctttaattcacaagggacacaaactcaagaaaacgcagatgttcaattagaaccagtctatcgtattaaggaaggtattaaacaaaagcaaatacgagaccaaattagacaagcgttaaatgatgtgacaattcatgaatggttaactgatgaactaagagaaaaatataaattagagaccttggactttactttgaacacattacatcatcctaaaagtaaagaggatttattacgtgctcgtagaacctatgcatttactgaactgtttttattcgaattacgtatgcaatggctaaatagattagaaaagtcatctgacgaagcaattgaaattgattatggcttagaccaagttaaatcatttattgatcgtttaccttttgaactaactgaagcacagaaatccagtgttaatgaaatttttagagatttaaaagcaccaatacgtatgcatcgattacttcaaggtgatgtaggttcaggaaaaacagtagttgctgcaatttgtatgtatgcgttaaaaacggctggttatcaatcagcattgatggtaccaactgaaattttagcagagcaacatgctgaaagtttaatggctttatttggagattctatgaacgttgcattgttaactgggtcagtaaaaggtaagaaacgaaagatacttttagaacaacttgaaaatggtacgattgattgtttaattggaacccatgctttgattcaagatgatgtgattttccataatgttggtttagtaattacagatgaacaacatcgatttggtgtgaatcaacgccagcttttaagagaaaaaggtgcaatgacgaatgtgttatttatgacagcaaccccgataccaagaacactagcaatatcagtttttggtgagatggatgtgtcttcaattaaacaattaccaaaaggtcgtaaacctatcattactacttgggcaaagcatgagcaatacgataaagttttgatgcaaatgacctcagagttgaaaaaaggtcgtcaagcatatgtcatttgcccgctaatagaaagttctgagcatctcgaagatgttcaaaatgttgtcgcattgtacgagtctttacaacagtattatggtgtttcccgtgtagggttattgcatggtaagttatctgccgatgaaaaagatgaggtcatgcaaaagtttagtaatcatgagatagatgttttagtttctactactgttgttgaagtaggtgttaatgtaccgaatgcaacttttatgatgatttatgatgcggatcgctttggattatcaactttacatcagttacgcggtcgtgtaggtagaagtgaccagcaaagttactgtgttttaattgcatcccctaaaacagaaacaggaattgaaagaatgacaattatgacacaaacaacggatggatttgaattgagtgaacgagacttagaaatgcgtggtcctggagatttctttggtgttaaacaaagtgggttgccagatttcttagttgccaatttagttgaagattatcgtatgttagaagttgctcgtgatgaagcagctgaacttattcaatctggcgtattctttgaaaatacgtatcaacatttacgtcattttgttgaagaaaatttattacatcgcagttttgactaattaccatgctgatttgtcaatttgagtgcaacacttcgttaattgagtgatatgacacttgaactatttaaatgtaaagtggtattttaacaatttataaatttccgactaaataatagctaaataatacagttatttgttgagtcggttaaatagaaagtgttatgatatgtgaggaatgtttaagactaggtactaaaaaatgaggggtgagacgttgaaactaaagaaagataaacgtagagaagcaatcagacaacaaattgatagcaatcccttcatcacagaccatgaactaagcgacttatttcaagtgagtatacaaacaattcgtttagatcgcacttatttaaacataccagaattaaggaagcgtattaaattagttgctgaaaagaattatgaccaaataagttctattgaagaacaagaatttattggtgatttgattcaagtcaatccaaatgttaaagcgcaatcaattttagatattacatcggattctgtttttcataaaactggaattgcgcgtggtcatgtgctgtttgctcaggcaaattcgttatgtgttgcgctaattaagcaaccaacagttttaactcatgagagtagcattcaatttattgaaaaagtaaaattaaatgatacggtaagagcagaagcacgagttgtaaatcaaactgcaaaacattattacgtcgaagtaaagtcatatgttaaacatacattagttttcaaaggaaattttaaaatgttttatgataagcgaggataaaattatggttaaattagcaattgatatgatgggtggcgacaatgcgcctgatatcgtattagaagccgtacaaaaggctgttgaagactttaaagatctagaaattatacttttcggtgacgaaaaaaagtataatctgaaccatgaacgaatcgaatttagacattgttctgaaaagattgaaatggaagatgagcctgttagagcgattaaacgtaaaaaagatagctcaatggtaaaaatggctgaagctgtgaaatctggtgaagcagatggatgtgtgtcagcaggtaatactggtgctttaatgtcagctggtttattcattgttggacgtattaaaggtgtagctagaccggctttagtagtaacattgccaacgattgatggaaaaggttttgtatttttagacgttggtgcaaatgctgatgctaaacctgaacacttattacagtatgcgcaactaggggatatttatgctcaaaaaatcagaggtattgataatccgaaaatctcattattaaatataggtaccgagccagctaaaggtaatagtttaacgaaaaaatcatatgagttattaaatcaagatcattcattgaattttgttgggaatattgaagcgaagacattaatggatggcgatacagatgttgtagttaccgatggctatactgggaacatggtccttaaaaatttagaaggtactgcaaaatcaatcggtaaaatgttaaaagatacgattatgagtagtactaaaaataaattagcaggtgcaatattgaagaaagatttagcagaattcgctaaaaagatggattactcagaatacggtggttcagtattattaggattggaaggtactgtagttaaagcacacggtagttcaaatgctaaagctttttattctgcaattagacaagcgaaaatcgcaggagaacaaaatattgtacaaacaatgaaagagactgtaggtgaatcaaatgagtaaaacagcaattatttttccgggacaaggtgcccaaaaagttggtatggcacaagatttgtttaataacaatgatcaagcaactgaaattttaacttcagcagcaaagacgttagactttgatattttagagacaatgtttactgatgaagaaggtaaattgggtgaaactgaaaacacgcaaccagctttattgacgcatagttcggcattattagcagcgctaaaaaatttgaatcctgattttactatggggcatagtttaggtgaatattcaagtttagttgcagctgacgtattatcatttgaagatgcagttaaaattgttagaaaacgtggtcaattaatggcgcaagcatttcctactggtgtaggaagtatggctgcagtattgggcttagattttgataaagtcgatgaaatttgtaagtcattatcatctgatgacaaaataattgaaccagcaaacattaattgcccaggtcaaattgttgtttcaggtcacaaagctttaattgatgagctagtagaaaaaggtaaatcattaggtgcaaaacgtgtcatgcctttagcagtatctggtccattccattcatcgctaatgaaagtgattgaagaagatttttcaagttatattaatcaatttgaatggcgtgatgctaagtttcctgtagttcaaaatgtaaatgcgcaaggtgaaactgacaatgaagtaattaaatctaatatggtcaagcaattatattcaccagtacaattcattaactcaacagaatggctaatagaccaaggtgttgatcattttattgaaattggtcctggaaaagttttatctggcttaattaaaaaaataaatagagatgttaagttaacatcaattcaaactttagaagatgtgaaaggatggaatgaaaatgactaagagtgctttagtaacaggtgcatcaagaggaattggacgtagtattgcgttacaattagcagaagaaggatataatgtagcagtaaactatgcaggcagcaaagagaaagctgaagcagtagtcgaagaaatcaaagctaaaggtgttgacagttttgcgattcaagcaaatgttgccgatgctgatgaagttaaagcaatgattaaagaagtagttagccaatttggttctttagatgttttagtaaataatgcaggtattactcgcgataatttattaatgcgtatgaaagaacaagagtgggatgatgttattgacacaaacttaaaaggtgtatttaactgtatccaaaaagcaacaccacaaatgttaagacaacgtagtggtgctatcatcaatttatcaagtgttgttggagcagtaggtaatccgggacaagcaaactatgttgcaacaaaagcaggtgttattggtttaactaaatctgcggcgcgtgaattagcatctcgtggtatcactgtaaatgcagttgcacctggttttattgtttctgatatgacagatgctttaagtgatgagcttaaagaacaaatgttgactcaaattccgttagcacgttttggtcaagacacagatattgctaatacagtagcgttcttagcatcagacaaagcaaaatatattacaggtcaaacaatccatgtaaatggtggaatgtacatgtaatatatttgagctaaagctcaagataaagacgtagtaatcaataaattgataactgataagcggaacgcctgagctaaagctaattgacgcagtggttgactggtcatccaatggagaattgcctgacctagtcaactttgcgggggaaattctaagcaacctagataaggttcgagaatttctccctaagaaacactaatcaataaattgataagaagattagaggaacgcttgagctaaagctcatgcataagaaacactaatcaataaattgataagtgtttctaaaatttctacttgttttttagaatttaaaatgggaaaatataatagtctatgtataggcatttttaaaggaggtgaatcgacgtggaaaatttcgataaagtaaaagatatcatcgttgaccgtttaggtgtagacgctgataaagtaactgaagatgcatctttcaaagatgatttaggcgctgactcacttgatatcgctgaattagtaatggaattagaagacgagtttggtactgaaattcctgatgaagaagctgaaaaaatcaacactgttggtgatgctgttaaatttattaacagtcttgaaaaataataaatcttacatctgggtcgtcagtattgtcgactcagtttttttctttaattatcaatagttttaacgtaaaattaaagatgattcaagagcaacacataaaggagataaaataatgtctaaacaaaagaaaagtgagatagttaatcgttttagaaagcgctttgatactaaaatgacagagttaggctttacttatcaaaatattgatttataccaacaagcattttcgcattcgagttttattaatgattttaatatgaatcgtttagaccataatgagcgtttagagtttttgggtgatgcggtattagaattgacggtttcacgatatttatttgataaacatcccaacttgccagaagggaatttaacaaaaatgcgtgccactattgtatgtgagccctcacttgtaatatttgcgaataaaattggattgaacgaaatgattttacttggtaaaggtgaagagaaaacagggggacgtacaagaccatcattaatatcagatgcattcgaagcatttattggggcattgtatttggatcaaggactagatatagtttggaaatttgctgagaaagtcattttcccacatgtagaacaaaatgagttattaggcgtggtagattttaaaacacaattccaagaatatgtgcaccagcaaaataaaggtgatgtaacctataatttaataaaagaagagggaccggcacatcatcgtctattcacttcagaagttattctgcaaggggaagcaatagctgaaggtaaagggaaaacgaaaaaagaatcagaacaacgtgctgctgaaagtgcctataagcaattaaaacaaattaaatagaaatttatatgatacgacatataggtgttcgatttaggatttaaggaagaatttttaatattttatggaacaacttcgaaatttaatatacaaatactaaaatatcgtatacatgtgttctttaaaattgtgataaggagtttaggatggtttatttaaaatcaatagatgccattggatttaagtcttttgcagatcaaaccaatgttcaattcgataaaggtgtaactgcaattgttggtccaaatggaagcggtaaaagtaatattacagatgctattaaatgggtgttgggtgaacaatcggctaaatcattacgtggctcaaaaatggaagatattatcttctcaggtgcagaacatcgcaaagctcaaaattatgctgaagtacagttaagattagataatcattctaaaaagctcagtgttgatgaaaacgaagttattgtaacaagaagattgtatcgaagtggtgaaagtgagtactacataaataatgaccgtgcaagattaaaagatattgccgatttatttttagattctggattgggaaaagaagcgtatagcattatctcgcaaggtagagttgatgaaatactaaatgctaaaccaattgatagacgtcaaattattgaagaatcggctggtgtacttaaatataaaaaacgtaaagctgaatcattaaataaacttgaccaaacagaagataatttaacgagagtagaagacattttatatgatttggaaggtcgtgtagaacctctaaaagaggaggcagctatagctaaagaatataagacactttcacatcaaatgaaacatagtgacattgtagttacagtgcacgatattgatcaatatacaaatgacaatagacaattagatcaacgtttaaatgatttacaaggccaacaagcaaataaagaagctgacaaacaacgtttaagccaacaaattcaacaatataaaggtaaacgtcatcaacttgataatgatgttgaatcgcttaattatcaattagtaaaagctacggaagcctttgaaaaatatacgggacaattaaatgttttagaagaacgtaagaaaaatcaatctgaaacaaatgcacgatatgaagaagaacaagaaaatttaatggagcttttagaaaatatatcaaatgagatttctggagctcaagatacttataagtctctgaaaagtaaacaaaaagaactcaatgctgtcattcgtgaacttgaagaacaactttatgtttcagacgaagcacatgatgaaaaattggaagaaattaaaaacgaatactatacattaatgtcagagcaatcagatgttaacaatgatattcgttttttaaagcatactatagaagagaatgaggctaaaaaatcaagactagattctcgattagttgaagtttttgagcaattgaaagatattcagggtcaaataaaaacgacaaaaaaagaatatcaacagaccaacaaagaactttctgctgtagataaagaaattaaaaatatagaaaaagatctcactgatacaaaaaaagcacaaaatgaatacgaagagaaattgtatcaagcatatcgatataccgaaaaaatgaaaacacgtattgatagtttggcaacgcaagaggaagaatatacttattttttcaatggcgtcaaacatattttgaaagctaaaaataaagaattaaagggtattcatggtgcagttgcggaaattattgatgtgccatctaaattaactcaggcaattgaaacagcattaggtgcttcattacaacatgtcattgtagattcagaaaaagatggacgccaggctattcaatttttaaaagaacgtaatttaggtcgtgcgacgtttttaccattaaatgttatacagagtagagtggtagcgactgatattaaatctattgctaaagaggcaaacggatttattagtattgcttcggaagcagttaaagtagcaccagaatatcaaaatattatcgggaatttattaggtaatacgattatcgttgatcatttaaagcatgcaaatgaattggcacgtgcgattaaatatcgaactcgtattgttactttggaaggtgatattgtaaaccctggtggttctatgactggtggtggcgctcgtaagtccaaaagtattctgtctcaaaaagacgagttgacaacaatgagacaccaattagaagattacttgcgtcaaacagaatcatttgaacaacaatttaaagagttgaagataaaaagtgatcaattaagtgaactgtattttgaaaaaagtcaaaagcataatacacttaaagagcaagtgcatcattttgaaatggagctcgatagattaactacacaagaaacacaaataaaaaatgatcatgaagaattcgaatttgaaaaaaatgatggttatacgagtgacaaaagtcgacaaactttgagtgaaaaagaaactcatttagaaagtattaaagcatctttaaaacgactagaagatgaaattgaacgctacacaaaactttctaaagaaggtaaggaaagcgtaactaaaacacaacaaacgttacatcagaaacaatctgatcttgctgtggttaaagagcgtattaaaacacaacaacagacaatagatcgattaaataatcaaaatcaacaaactaaacatcaattaaaagatgttaaagaaaaaattgcattgtttaattcggatgaagtgatgggcgaacaagcttttcaaaatattaaagatcaaattaatggtcaacaagaaacgagaacacgcttatctgatgaattagataaattgaaacaacaacgtattgagttgaatgaacaaatcgatgcgcaagaagctaaactacaagtttgtcaccaagatattttagctatcgaaaatcactaccaagatattaaagctgaacaatcaaagctagatgtattaattcatcatgcgatagatcatttaaatgatgaatatcaattgactgttgaacgtgcgaaatctgaatatacgagtgatgaatcgattgacgcattacgtaaaaaagttaagttaatgaagatgtcgattgatgaactaggtcctgtaaacttaaatgcaattgaacaatttgaagagttaaatgaacgttatacatttttaagtgaacaacgtacagatcttcgtaaagctaaagaaacattagagcaaattataagtgaaatggatcaagaggttactgaaagatttaaagaaactttccatgctattcaaggacattttacagctgtgttcaaacaattgtttggtggaggcgatgcagaattgcaattaactgaagccgattatttaacagctggtattgatattgtggtacaaccaccgggtaaaaagttgcaacatttatcgttactgagtggtggtgagcgtgcattaactgctattgctttactatttgcaattttaaaagtaagatctgcaccttttgttatattagatgaggttgaagctgcactagatgaagcaaatgttattagatacgcaaaatatttaaatgagttatcagacgaaacacaattcattgttattacacaccgtaaaggaacaatggaatttgcggataggttatacggtgtaacaatgcaagaatcaggtgttactaaacttgtgagtgtgaatttaaatacaatagatgatgtgttgaaggaggagcaataatgagcttttttaaacgcttaaaagataagtttgcaacaaataaagaaaatgaagaagttaaatccttaacagaagaacaaggtcaagacaaattagaagatacacattctgaaagttcaacgcaggacgcaaatgatttagcagaaaatgctgaagtgaaaaagaagccacgcaagttgagtgaagcggattttgatgacgatggcttaatatcaattgaagattttgaagaaattgaagctcaaaaaatgggtgctaaatttaaagcaggactcgaaaaatctcgtcaaaatttccaagaacaattaaataatttgatagcgagatatcgtaaagtagatgaagacttttttgaagctttagaagaaatgttaatcactgcagacgtcggttttaatacagtgatgacgttaactgaagaattacgtatggaagcacaacgacgtaatattcaagatactgaagatttgcgtgaagtcattgttgaaaaaatcgtagagatttaccatcaagaagatgataattcagaagctatgaacttagaagatggtcgtttaaatgtcattttaatggttggtgtgaatggtgttggtaaaacaacaacaattggaaaattagcttaccgatataaaatggaaggtaaaaaagtaatgttagctgcgggcgatacttttagagcgggtgctattgatcaattgaaagtttggggcgaacgtgttggtgtagacgtaattagccaaagtgaaggttctgatccagctgctgttatgtatgatgcgattaatgccgctaaaaacaaaggtgttgatattttaatctgtgataccgctggacgtttacaaaataaaacaaatctaatgcaagaattagaaaaagttaagcgtgtaattaatcgagcagtgccagatgcgcctcatgaagcattactatgtttagatgctacaactggtcagaatgcgttgtcacaagctagaaactttaaagaagtaacaaatgttacaggtattgtattaacgaaattagatggtacagccaaaggtggtatcgtattagccattcgtaatgaattgcacattccagttaaatatgtaggtttaggtgagcaattagatgacttacaaccatttaaccctgaaagttatgtctacggcttattcgctgatatgattgaacaaaatgaagaaataacaacagttgaaaatgatcaaattgtaacagaagaaaaggacgataatcatgggtcaaaatgatttagttaaaacgttacgaatgaattatttgtttgatttttatcaatccttattgacgaataaacaacgtaattatttggaattattttatcttgaagattattctttaagtgaaatcgcagatacttttaatgtgagtagacaagcagtttatgataatataagaagaactggcgatttagttgaagattatgaaaagaaattggaattataccagaaatttgagcaacgccgagaaatatatgatgaaatgaaacaacatttaagtaatccagaacaaatacaacgttatattcaacaattagaagacttagaatagatataaattgagggaggacatcgatatggcatttgaagggttatcagaacgcttgcaagcgacgatgcaaaaaatgcgtggtaagggtaaacttactgaagctgatataaagataatgatgcgtgaagtaagattagcgttacttgaggctgacgtaaactttaaagtggtaaaagaatttattaaaacagtatcagaacgcgcattaggttccgatgtaatgcaatcattaacaccagggcaacaagttattaaaatagttcaagatgaattaacgcagttgatgggtggagaaaatacgtcgattaatatgtcaaataaaccacctactgttgttatgatggttggtttacaaggtgctggtaaaacaacaactgcaggtaaattagcattattgatgcgtaaaaaatacaacaaaaaacctatgttagttgcagcagatatttatcgtccagcagcgataaatcaattacaaacagtagggaaacaaattgatattcctgtatacagtgaaggagatcaagtaaagccacaacaaattgtaactaatgcattaaaacatgctaaagaagaacatttagactttgtaatcattgatacagcaggtcgattacacatcgatgaagcattgatgaacgaattaaaagaagtaaaagacattgctaaaccaaacgaaattatgttagttgtcgattcaatgacgggtcaagatgctgtcaatgttgcagaatcttttgacgatcaacttgatgtcacaggtgttaccttaactaaattagatggtgatacacgtggtggtgcagctttatctattcgttcggtgacacaaaaaccaattaaatttgttggtatgagtgaaaagttagatggtttagagctattccatcctgaacgtatggcatcacgtattttaggtatgggtgatgtgttaagtttaattgaaaaagcgcaacaagatgtggatcaagaaaaagcaaaagatttagagaaaaagatgcgtgagtcatcgtttactttagatgattttttagaacaacttgatcaggtgaaaaatctaggaccactggatgatattatgaaaatgattccaggtatgaataaaatgaaagggctagataagcttaatatgagtgaaaagcaaattgatcatattaaagcgattatccagtcaatgacgccggctgaaagaaacaatccagacacattgaatgtatcacgtaaaaagcgtattgctaaagggtctggtcgttcattacaagaagtcaatcgtttgatgaaacaatttaacgatatgaagaaaatgatgaaacaattcactggtggcggtaaaggtaaaaaaggtaaacgcaatcaaatgcaaaatatgttaaaaggtatgaatttaccgttttaatgtttaatataacacgctgatttttgttgcaatgagatgtgcatcccgaaagttatactaaagaatataactttatggggtgcatatttttagatacacaataataattaaaaactgaaattgcggatttgctagaacatgaggttattgttgctaatattaataagttatattgggggaatgtgtgcggtagaagtggtaccattcatgtccttacgggataaattaactaaacacgtatgtggtgaaggctactatgaatttttataacctattaacagtctaatttagtaatcacatagttattattgtaagaaaaaggttcaataattttcctggtaaagaaaaaactctttataaacattcacacacctgttaatattatttcttgtagaaaataaaaattaaaacatgacttaaaggagattttataaatggcagttaaaattcgtttaacacgtttaggttcaaaaagaaatccattctatcgtatcgtagtagcagatgctcgttctccacgtgacggacgtatcatcgaacaaatcggtacttataacccaacgagcgctaatgctccagaaattaaagttgacgaagcgttagctttaaaatggttaaatgatggtgcgaaaccaactgatacagttcacaatatcttatcaaaagaaggtattatgaaaaaatttgacgaacaaaagaaagctaagtaatttagcgtaaaattgttctaacaataagaataactcgtttacactgacagttattactcaatgatacgttgggaatatcacatgttagtaatatagaacgtattgggtaccataatggtgccctttttctttgaattattttcaattaaaatagaagtgttcaaagcatagagttggaggtaatagaatgagagttgaagttggtcaaattgttaacacacatggtattaaaggtgaaattaaagtaaaatccaattcagactttacagacgttcgttttcaacccggtcaagtgctgacagttgtgcataacaataacgaccttgaatatactgttaagtcacatagagtgcataaagggcttcatatgcttacatttgaaggtattaataatattaatgatattgagcatttaaaagggagttctatttatcaagagcgtgatcatgaagatatcgtacttgaggaaaatgaattttattattcagatattataggatgtacagtttttgatgatcaagaaacaccaataggtcgtgtaattaatatatttgaaacaggtgcgaatgatgtgtgggtgattaaaggatctaaagaatatttgattccttatattgctgatgttgtaaaagaagtggatgttgaaaataaaaaaattatcatcacgccaatggaaggattgttggattaatgaaaattgattatttaactttatttcctgaaatgtttgatggtgttttaaatcattcaattatgaaacgtgcccaagaaaacaataaattacaaatcaatacggttaattttagagattatgcaattaacaagcacaaccaagtagatgattatccgtatggtggcggacaaggtatggtgttaaagcctgaacctgtttttaatgcgatggaagacttagatgtcacagaacaaacacgcgttattttaatgtgtccacaaggcgagccattttcacatcagaaagctgttgaattaagcaaggccgaccacatcgttttcatatgcggacattatgaaggttacgatgaacgtatccgaacacatcttgtcacagatgaaatatcaatgggtgactatgttttaactggtggagaattgccagcgatgaccatgactgatgctattgttagactgattccaggtgttttaggtaatgaacagtcacatcaagacgattcattttcagatgggttattagagtttccgcaatatacacgtccgcgtgaatttaagggtctaacagttccagatgttttattgtctggaaatcatgccaatattgatgcatggagacatgagcaaaagttgatccgcacatataataaaagacctgacttaattgaaaaatatccattaactaatgcagataagcaaatattagaaagatataaaataggattgaaaaaaggttagtattgtgctaacataatctgagtgtggaaacacaaaaatcactatgatccgctgctatatatttgtcgaggcaagaacataggttgaagaggagaatttataatgacaaatcacaaattaatcgaagcagtaactaaatcacaattacgtacagacttacctagtttccgtcctggtgatactttacgtgtacacgtacgtatcattgagggtactcgtgagcgtatccaagtattcgaaggcgttgtaattaaacgtcgtggcggtggcgtttctgaaacgtttacagttcgtaaaatttcatcaggtgttggcgtggaacgtacattcccattacacacaccaaaaattgaaaaaatcgaagttaaacgtcgtggtaaagtacgtcgtgctaaattatattacttacgtagtttacgtggtaaagctgctagaatccaagaaattcgttaatcagcatttaaacaaagctatgtatgagtcaaattcgactcaaacaataaagccatctaggtcacttttatggagtgatatagatggctttttttgctgtttagttaatgtaaagttgataatgtaattgtttattccttctctattcataacgtgtttgctcaaaatggttatataaacaaaaggctgggacataaatcaatgttctatctctacgaagttatattggcagtagttgactgaacgaaaatgcacttgtaacaagcctttttcaattctagtcaggggccccaacacagaagctgacgaaaagtcagcttacaataatgtgcaagttggcggggccccaacatagaagctggcggaaagtcagcttacaataatgtgcaagttggggtgggacgacgaaataaattttgcgaaaatatcatttctgtcccactcccattaaatatatgcgtagctacattatttttgtcttgcccatctcgtgaaaataatactacatataatgccaaatatagtaattgttataagtaaataatagtatggtggggcatagctcaattgaatctttgttatatttttaggtgctttaatgccggtcataacaccatttacttgttcaactttaagactttgatcacctgatgtcgctttcataccttgattatatgctgttggcaaaacaatatacccagatgaatttttatttttagtaatagtataaccttgctttgtcttactaactttgacagcctctaatgaatttgaagcgtctttaagcgtggtataatcttcgccgtatatcccttttaaatttacacgatacttacctttaggcaatgataatctaatcctatctgaagctttaatgcgtattgttacgggtgttacaaagcgtcgatatttataagtgagtttatttctttcttgtgtatattcattcactttaacatcatgagctttatccggcgaaagtaattctaaatccatttcaaaatacaaatctttaaattgattagaaactgattttggcaactgtacagttagaccaccattattttgtttaacttgtaataaatgttttgtaggagattgccaggctgcactatttaatttaattgttgaatctgatagtaaatttttattggctttaaaatgtgtattaacatctttagtcttgttagaaacaatcccttgcaacattgcttgttctttatctaatggagattttaattctttattggaaaagaccttatttgtaatatgtgcacttggataatggatggtatttttagaatgaatccaacgaactttattgtctttgtgttcagacttaattttaaatccatatggtaagttgtcatcatgattcactctaattcgatcattaacattccaaagtgatagtaaattttgacgattgccaagtaatctataagtgctgtttttatcgattggcatattaatttggagtgtcttgtcataatattttaatatgtctccattaaaaatactagaatataatgaaatgccattataatgatatataaatggtgaatttaatgcatagtctgacatataatcaatgcgattaaatggaccagttgcattttgatttatcttttttataagctggtttacatagttactatggtaatcatgttgtttcaacgttgataatgattgttgataaggtttgattgccatatttttattgttatctaaaatgacgatttgttgaatcataacgattaatactaatattgcaacggttaattttttataacgccataaactaaattttaaaataacggcaagcaccattagcaggataatacctactataagtgcaagtgggtgtgtcggtgatagtaatacataaagtaatgcgatgatgcttactggtattgttctgattaaataatatttcatatttaatgttgataaatgttgaataaacaatccgcaaagagcgcttgatgatagtgctaagatatacacccaacgcctttctggaaatgaaaaaccattaaaagcactgtcgaaatactgtgataatgaaccaataaataataaccatgttactattgcgaaaagtctataaaagtaaaaacgatacagtttgaatgacaataatgcaacgatagtaagaattgaaatcgtaatataaaatccatcgctaaagaaaaaataatggtaatcaagtggtgtcaaaaacggtatatcaacattgggattttgctttctgtcattttccaaaaacgcagaaatgccagtgaataaaccaaatacacttgataacacactcaaaactgtagcagatatgacgcaaattaatttttgtgttctagagacaatgtcatatttgtaagtgaaaatgagtcgatataaatagtagcaacctataataatagcttgataataactgaaataaaaattgctaaatagtgttaaggctatcgcaacaatgaaaataccgattttgcgttgttgaaaatatctttccaaaccaagaatcgataatggtaataaatataataaacttccataaaatgaccaagtaaaattaaagtatataacgacagttgacatgccgtataaaatcgtagcgatcatatttgttgagcgtttaaagtgtaatattttaaataagtagaaggtcacgacaaatgttatgatagctcttatcatggccataataagttggtttgtcggccaaaaatgtattgttgtcggattaaatataccaaccgtttctcctattttaatgaatagaaaatttagccacattaaaggtgacagcgaataataatatgatagtcctttcatataatcgccacctaatccaaacgatgcatcatataaactagaaaaactacttaaatgttcatacaaatacatttgaaatggcatcatttgacggaatccatctccagccccactaaaaacagtaccattcacaatataatcatagatatgagtagaaaataaaataagcgttaatattacactaatgaaagttataacaaagaattgtttgacgtttgaatttagccacttttttaacacaacattatcctcaactttcaaatttaaaattaagtttaactgaaactaaagttaatgaggttcttgataggtaaagacgaagatgactgtggaacagataccttatcatagttacttaaactttggatcattttcagtttatcattaaacaaatatattgaataataaaaatgtcatactgataaagatgaatgtcacttaataagtaacttagatttaacaaatgatgatttttaattgtagaaaacttgaaataatcacttatacctaaatctaaagcattgttaagaagtgtgacaatgttaaaataaatatagttgaattaatgaatttgttctataattaacaggttatagattttaataatgagaaaagaattgacgaaagtaaggtgaattgaatggttattcaatggtatccaggacatatggcgaaagccaaaagagaagtaagtgaacaattaaaaaaagtagatgtagtgtttgaactagtagatgcaagaattccatatagttcaagaaaccctatgatagatgaagttattaaccaaaaaccacgtgttgttatattaaataaaaaagatatgtctaatttaaatgagatgtcaaaatgggaacaattttttattgataaaggatactatcctgtatcggtggatgctaagcacggtaaaaatttaaagaaagtggaagctgcagcaattaaagcgactgctgaaaaatttgaacgtgaaaaagcaaagggacttaagccaagagcgattagagcgatgattgttggaattccaaatgttggtaaatccacattaataaataaactggcaaagcgtagtattgcgcagactggtaataaaccaggtgtgaccaaacaacaacaatggattaaagttggtaatgcattacaactattagacacaccagggatactttggcctaaatttgaagatgaagaagtcggtaagaagttgagtttaacaggcgcgattaaagatagcattgtgcacttagatgaagtagctatatatggattgaactttttaattcaacatgatttagcgcgattaaagtcacattataatattgaagttcctgaagatgcagaaatcatagcgtggtttgatgcgatagggaaaaaacgtggcttaattcgacgtggtaatgaaattgattacgaagcagtcattgaactgattatttatgatattcgaaatgctaaaataggaaattattgttttgatatttttaaagatatgactgaggaattagcaaatgacgctaacaattaaagaagttaagcagttgattaatgcggttaatacaatagaagaattagaaaatcatgaatgctttttagatgagcgaaaaggtgttcaaaatgccatagctaggcgcagaaaagcgttagaaaaagaacaagctttaaaagaaaagtatgttgaaatgacttactttgaaaatgaaatattaaaagagcatcctaatgcaattatttgtggtattgatgaagttggaagaggacctttagcaggtccagtcgttgcatgcgcaacaattttaaattcaaatcacaattatttgggccttgatgactcgaaaaaagtacctgttacgaaacgtctagaattaaatgaagcactaaaaaatgaagttactgcttttgcatatggtatcgcgacagctgaagaaatagatgaatttaatatttataaagctactcaaatcgccatgcagcgagctattgatggattatcagtacaaccaacgcatttattgatagacgcgatgacgcttgataatgcactgcctcaagtatctttaatcaagggtgatgcaagaagtgtatctattgcagcggcaagtatcatggcaaaggtttttcgtgatgattatatgacacagttatctaaagattatcctgaatatggttttgaaaaaaacgcgggttacggtaccaaacaacatttactagcaatcgatgatattggcattatgaaagagcatagaaaaagctttgaacctataaaatcgttactgtaaatcgtaaaattcaattaaatgataaaaaagtagcatttaagtttacaatagcgcttacattttttataattgtaagggaacttaacctaagtaacaggaggatggaagatgaatatccacgagtatcaaggtaaagaaatatttcgttcaatgggcgttgcagttccagaaggacgagtagcatttactgctgaagaagcggtggagaaagcaaaagaattaaattctgatgtttatgttgtaaaagcacaaattcatgctggaggtagaggtaaagcaggcggagtaaaaattgctaaatctttatctgaggtagaaacatatgcaaaagaattattagggaaaactttggtgacacatcaaactggtccagaaggtaaagaaattaagcgtttatatatcgaagaaggttgtgctattcaaaaagaatattacgttggattcgttattgatcgtgcgactgaccaagtaacattgatggcgtctgaagaagggggcactgagattgaagaagttgctgcgaagactcctgaaaagatcttcaaagaaactatcgatccagtaatcggactttcaccattccaagcaagacgaattgcgtttaatattaatattcctaaagaatctgttaacaaagcagctaaattcttattagcactttataatgtattcattgaaaaagattgttcaatcgtagaaatcaacccattagttacaacagctgatggtgatgtattggcattagatgctaaaattaattttgatgataatgcattattcagacataaagatgttgtagaattacgtgatttagaagaagaagatccgaaagagattgaagcgtctaaacatgatttatcatacattgcattagatggtgacatcggatgtatggttaatggtgcaggtttagccatggcaacaatggatacgattaatcatttcggtggaaacccagccaatttcttagatgcaggcggaagcgctactagagaaaaagtaactgaagcatttaaaatcattttaggtgatgaaaatgttaaaggtatttttgtaaacattttcggtggcattatgaaatgtgatgttatcgcagaaggtatcgttgaagctgtaaaagaagtagatttaactttaccactagttgtacgcttagaaggtacaaatgttgagttaggtaaaaaaatcttaaaagactcaggattagcaattgaaccagcagcaacaatggctgaaggtgcacaaaaaattgttaaactagtcaaagaagcataaggaaaggatgggagcactaagatgagtgtatttatagataagaatactaaagtaatggtacaaggtattacagggtctactgcccttttccatacaaaacaaatgcttgattatggtaccaaaatagtagcaggtgtgacgcctggtaaaggtggtcaagttgttgaaggcgttcctgttttcaacactgttgaagaagctaaaaatgaaaccggggcaacggtttcagtcatttacgttccagcaccatttgctgcagactcaattttagaagcagctgatgcagacttagatatggttatttgtatcactgaacatattcctgtattagacatggttaaagttaaacgctacttacaaggtagaaaaacacgtttagttggtccaaactgtccaggtgtgattacagcagatgaatgtaaaattggtattatgcctggctatattcacaaaaaaggtcatgttggtgtagtatctcgttcaggtacattaacatatgaagcagtgcaccaattgactgaagaaggtattggtcaaactacagctgttggtattggtggagacccagtcaacggaacaaactttattgatgttttaaaagcattcaatgaagatgacgaaacgaaagcagttgttatgattggtgaaatcggtggtacggctgaagaagaagcagctgaatggattaaagcgaatatgacaaaaccagttgtaggctttatcggtggacaaacagcacctcctggaaaacgtatgggacatgctggtgcaatcatttcaggtggtaaaggtactgctgaagagaaaattaaaacattaaatagttgtggtgtgaaaacagcggcaacaccttcagaaattggttcaacattaattgaagctgctaaagaagcaggtatttatgaagcattattaactgttaataaataaagttaaaagatgatataaatggctatagcccattccatactttataaaagtattggaaatgggctatttgtcgtgcgatgaattttagtacacttttcatattttggaaagacaagttaattattttacctcctacaatagctttacaaaacaaagaaaattttaattaaaatatatagcgcactatgttataatgtttgtatattattgtaaggagtgtttcatcatgaataaacaacaaagtaaagtacgctattcaattagaaaagttagtattggaattttgtcaatttcaataggtatgtttttggcattgggtatgtcgaacaaagcatatgcagatgaaattgataaatctaaagattttacaagagggtatgagcaaaatgtattcgcgaaatcagagttaaatgctaataaaaatacgacaaaagacaaaataaaaaatgaaggtgctgttaaaacatcggacacaagtttaaagttagacaacaaatcagcaatttcaaacggaaatgaaattaatcaagatataaagatttcaaatactccgaaaaactcaagccaaggtaacaatctagttattaataacaatgaacctactaaagaaattaaaattgcaaacttggaagctcaaaattctaatcagaagaaaacgaataaagttactaataattactttggttactacagttttagagaagctccaaaaacacaaatctatactgtaaaaaaaggagacacacttagtgctatagcattaaaatacaaaactacagtttcaaatattcaaaatacaaataatatagcaaatcctaatttaatatttattggtcaaaaattaaaagtgccaatgacaccattagtagaaccaaaaccaaaaacagtgtcttcaaataataaaagtaatagtaatagcagtacattaaattatttgaaaacattagagaatagaggatgggatttcgacggtagttatggatggcaatgtttcgatttagttaatgtatattggaatcatctttatggtcatggattaaaaggatatggagctaaagatataccatatgcaaataattttaatagtgaagctaaaatttatcacaacacaccaactttcaaagctgaacctggggacttagtggtttttagtggaagatttggtggaggatatggtcatacagctattgtcttaaatggtgattatgatggaaaattaatgaagttccaaagtttagatcaaaactggaataatggtggatggcgtaaagcagaggttgcacataaagttgttcataattatgaaaatgatatgatttttattagaccatttaaaaaagcataatttaaatcgaaggcaggacattgaaatatgaaattttcaactttaagtgaagaagaatttaccaactacaccaaaaagcacttcaaacattatacacagtctatagaattatataattatagaaataaaataaatcatgaagcacatattgtgggagtgaagaatgataaaaatgaagttatagctgcatgtttattaacagaggcacgaatttttaaattctacaaatatttctactctcatagaggtcctttacttgattatttcgatgctaaattagtttgttacttttttaaagaattatctaaattcatttataaaaatagaggagtatttattcttgttgatccatatttaatagagaatttaagagatgcaaatggtaggataataaagaattataataattcagtgatagtaaagatgctagggaaaattgggtatctccatcaaggttatacaacaggatattcaaataaaagtcaaattaggtggatttctgtattggatttaaaagataaagatgagaatcaacttttaaaagaaatggaataccaaactagaagaaatataaaaaagactattgagattggtgttaaggttgaagatttatctattgaagaaacaaatcgattttataaattatttcaaatggctgaagaaaaacatggttttcatttcatgaatgaagattattttaaacgaatgcaagaaatatataaagataaggcaatgttaaagatagcttgtataaatcttaatgaatatcaagataaattaaaaatacaattattgaaaatcgaaaatgaaatgatgactgtgaacagagcattaaatgaaaatccaaattctaaaaaaaataaatcaaaattaaatcagttaaatatgcaattatctagtattaataatagaattagtaaaaccgaagaactaatatttgaagatggacctgttttggatttagctgctgctttatttatatgtactgatgatgaagtttattatctatcaagtggatcaaatccgaaatataatcagtatatgggtgcatatcatctacaatggcatatgataaaatatgcaaaatcacataatattaataggtataatttttatggaataacaggcgtctttagtaatgaggcggatgattttggtgttcaacaatttaaaaagggttttaatgcacatgttgaagaattaattggtgatttcatcaaaccagtaagaccaattctatataaatttgcaaaacttatttataaggtttaattataaagtatgttggaaattgaaattttaaattctttccaacatacttttcactttttaagtcagtatttttactccttaaaataacattacatcgacaatgtttttgtattagaaatgtaaaacaaaaatagaatatgattttgtatgattacaaaaaggagttgatttattgattaaactatttttgcttaagttatactgggcacacttttcgactaaacaaattcatcaatttttaatggcatatcctaatgtaattaaagaggagggaagaaaaaaagatagttatttatgtgaatgggtgaatagggaagaaaatgttcatttattacgtaaatactatgcttttataaaacttgatcataacgatattattaaagaactgcagaaattaaaagtaagttacattacatatatggattctgaatacccagtgctattaaaagaaatatatcaatttccattacttcttttctataaagggaacatcaaattaataaataatatgcatcatttggcagtagtaggtgcaagagattctacaagttatacccaacagtctttagaatttttattatcaaatgataaaagcaaatatttaacaattgtttccggccttgctcaaggagctgatgcaatggcacatcaaatagctttaaaatacaatctccctacaattgcagttttagcctttggccatcaaacacattatcccaaaagtacattagcattaagaaataaaatagaagaaaaaggtttagttatatccgaatatccaccacatacaccaattgctaaatatagatttcctgagcgcaatagaattatcagcggtttgtcaaaaggggttttaattactgaggctaaggaacaaagtggcagtcacatcacgatagattttgcattagagcaaaatagaaatgtttatgttttacctggatctatgtttaatcctatgacaaaaggtaatttattacgtatccaagaaggtgctaaggtagtattaaacgctaatgatatatttgaagactactatatttaaaactaaaaataatgagttgcttcatatttcttttgttaccctttgtaatttattttttaataaaatctataaaaaatagacagggaaaatgatttgtttagatataaaacgttgacaaaagcaaaattaagcgtttatcatttatctttagtaattagattagcgagggggaaatgacattggcagataatttagtcattgttgaatcgcctgcaaaagcaaaaaccattgaaaagtatttaggtaagaaatataaagttatagcttcaatgggacacgtcagagacttaccaagaagtcaaatgggtgtcgacactgaagataattacgaaccaaaatatataacaatacgcggaaaaggtcctgttgtaaaagaattgaaaaaacatgcaaaaaaagcgaaaaacgtctttctcgcaagtgaccccgaccgtgaaggtgaagcaattgcttggcatttatcaaaaattttagagcttgaagattctaaagaaaatcgcgttgttttcaacgaaataactaaagacgctgttaaagaaagttttaaaaatcctagagaaattgaaatgaacttagtcgatgcacaacaagcgcgtcgaatattagatagattggttggctataacatctcgccagttctatggaaaaaagtaaaaaaaggtttgtcagcgggtcgagttcaatctgttgcacttcgtttagtcattgaccgtgaaaatgaaattcgaaactttaaaccagaagaatattggactattgaaggagaatttagatacaaaaaatcaaaattcaatgctaaattccttcattataaaaataaaccttttaaattaaaaacgaaaaaagatgttgagaaaattacagctgcactagatggagatcaattcgaaattacaaacgtgactaaaaaagaaaaaacgcgtaatccagcaaacccatttacaacttctacattacaacaagaggcggcacgtaaattaaactttaaagcaagaaaaacaatgatggtcgcacaacaattatatgaaggtatagatttgaaaaaacaaggtacgattggtttaataacatatatgagaaccgattctacacgtatttcagatactgccaaagctgaagcaaaacagtatataactgataaatacggtgaatcttacacttctaaacgtaaagcatcagggaaacaaggtgaccaagatgcccatgaggctattagaccttcaagtactatgcgtacgccagatgatatgaagtcatttttgacgaaagaccaataccgattatacaaattaatttgggaacgatttgttgctagtcaaatggctccagcaatacttgatacagtctcattagacataacacaaggtgacattaaatttagagcgaatggtcaaacaatcaagtttaaaggatttatgacactttatgtagaaactaaagatgatagtgatagcgaaaaggaaaataaactgcctaaattagagcaaggtgataaagtcacagcaactcaaattgaaccagctcaacactatacacaaccacctccaagatatactgaggcgagattagtaaaaacactagaagaattgaaaattgggcgaccatcaacttatgcaccgacaatagatacgattcaaaagcgtaactatgtcaaattagaaagtaagcgttttgttcctactgagttgggagaaatagttcatgaacaagtgaaagaatacttcccagagattattgatgtggaattcacagtgaatatggaaacgttacttgataagattgcagaaggcgacattacatggagaaaagtaatcgacggtttctttagtagctttaaacaagatgttgaacgtgctgaagaagagatggaaaagattgaaatcaaagatgagccagccggtgaagactgtgaagtttgtggttctcctatggttataaaaatgggacgctatggtaagttcatggcttgctcaaacttcccggattgtcgtaatacaaaagcgatagttaagtctattggtgttaaatgtccaaaatgtaatgatggtgacgtcgtagaaagaaaatctaaaaagaatcgtgtcttttatggatgttcgaaatatcctgaatgcgactttatctcttgggataagccgattggaagagattgtccaaaatgtaaccaatatcttgttgaaaataaaaaaggcaagacaacacaagtaatatgttcaaattgcgattataaagaggcagcgcagaaataatatttttatttcctagatacattttaaggttgttaaatagaatcattagtgaatcttattttaaagatagtaatggattaatctaaataagtgcggataatataaacataacaacataattaaaagacataaatgacaataaaaggagtatagaaatgactcaaactgtaaatgtaataggtgctggtcttgccggttcagaagcggcatatcaattagctgaaagaggaattaaagttaatctaatagagatgagacctgttaaacaaacaccagcgcaccatactgataaatttgcggaacttgtatgttccaattcattacgaggaaatgctttaactaatggtgtgggtgttttaaaagaagaaatgagaagattgaattctataattattgaagcggctgataaggcacgagttccagctggtggtgcattagcagttgatagacacgatttttcaggttatattactgaaacacttaaaaatcatgaaaatatcacagttattaatgaagaaattaatgccattccagatggatacacaattatcgcaacaggaccacttactacagaaacccttgcgcaagaaatagtggacattactggtaaagatcaactttatttctatgatgcggctgctccaattattgaaaaagaatctattgatatggataaagtttacttaaagtcccgttatgataaaggtgaagctgcatatttaaactgtcctatgactgaggatgaatttaatcgcttttatgatgcagtattagaagctgaagttgcgcctgtaaattcatttgaaaaagaaaaatatttcgagggttgtatgccttttgaagtaatggcagaacgcggacgcaagacattactatttggaccaatgaaaccagtaggattagaagatccaaagactgggaaacgtccttatgcagtggttcaattaagacaagatgatgctgctggcacactctacaatattgtcggcttccaaacgcatttaaaatggggagctcaaaaagaagttattaaattaattccaggtttagaaaatgttgatattgttagatatggtgtgatgcatagaaataccttcattaactcaccggacgtattaaacgagaaatatgaattgatttcacaaccaaacatacagtttgcgggacaaatgactggtgttgaaggttatgtagaaagcgcagctagcggcttagttgcaggtatcaatcttgcgcataaaatattaggcaaaggtgaggtagtatttcctagagaaacgatgattggaagtatggcttactatatttctcatgctaaaaataataagaatttccaacctatgaatgctaacttcgggttattaccatctttagaaactagaattaaagataaaaaagaacgctatgaagcacaagctaatagagctttggattacttagaaaatttcaaaaaaactttataaaatagttagaaagactagatatgctattcattcttaagtcatcaacgagtaagtaatgactttctaaatggaaaatacttatcctagtctttttaattttggaattgttacgtatttctgacaatttagaattcgcattcaaaaaatatctaaataaataacacgcaataagttgattgatgtaacatgtaagagaatgttttaaataaactttatttaaaaggcaatgaaataataaatggcaaggctattaataaagacttttagtaattaatttaaaaaagaggtattctaattaacaggttttccgattagttacaattatttaattctcaaaagatttagaattgattatcaaattactgtaagccctttgctgtatatgctacaattcttattgatggagggtaaatgtattgaatcatattcaagaagcgtttttaaatacattgaaagttgaacggaatttttcggaacatacattgaaatcatatcaagatgacttaattcagtttaatcaatttttagaacaagaacatttacagttgaaaacttttgaatacagagatgctagaaattatttgagctatttatattcaaatcatttgaaaagaacatctgtttctcgtaaaatctcaacgttaagaactttctatgaatattggatgacgcttgatgagaacattattaatccatttgttcaattagtacatccgaaaaaagaaaaatatcttccgcaattcttttacgaagaagaaatggaagcgttatttaaaactgtagaagaggacacttcaaaaagtttacgggatcgagttattcttgaattgttatatgctacaggtatccgtgtttcggaattagttaatattaaaaaacaagatatagatttttacgcgaatggtgttaccgtattaggaaaagggagcaaagagcgctttgtaccgtttggtgcttattgtagacaaagcatcgaaaattatttagaacatttcaaaccaattcagtcatgcaatcatgattttcttattgtaaatatgaagggtgaagcaatcactgaacgcggtgtacgatatgttttaaatgatattgttaaacgaacagcaggcgtaagtgagattcatccccacaagctcagacatacatttgcaacgcatttattgaatcaaggtgcagacctaagaacagtacaatcgttattaggtcatgttaatttgtcaacaactggtaaatatacacacgtatctaaccaacaattaagaaaagtgtatctaaatgcacatcctcgagcgaaaaaggagaatgaaacatgagtaatacaacattacatgcaacaacaatttatgctgtaagacataatgggaaagcagctatggctggagatgggcaagtaacgcttggtcaacaagtcatcatgaaacaaacggcaagaaaagtgcgacgtttatatgaaggtaaagtgttagctggtttcgcaggtagtgtagcagatgcgtttacgttatttgaaaaattcgaaacaaaattacaacagtttagtggtaacttagaaagagctgctgttgaattggcacaagaatggcgaggcgataaacaattacgtcaattagaagctatgctaattgtaatggataaagatgctattttagttgtcagtggaactggcgaagttattgccccagatgatgaccttatcgctattggatcaggaggcaactacgcattaagcgcaggacgtgcattgaaacgccatgcatcgcatttgtctgctgaagaaatggcatatgagagcttgaaagtagcggctgatatttgtgtctttaccaacgataatattgttgttgaaacactataataatcagagcacgataaataattacgagcaattaattttagttaaaagacggaggaatgaaattaatggatacagctggaataagattaactccaaaagaaatcgtatctaaattaaatgaatacatcgttggacaaaatgatgctaaacgtaaagtggcaattgccttacgtaatcgatacagaagaagtttattagatgaggaatcaaagcaagaaatttcacctaaaaatattttgatgattggaccaactggcgttggtaaaactgaaattgcaagaagaatggccaaagttgtcggcgcgccatttataaaagtagaagctactaaatttactgaggtaggttatgtaggacgagatgttgaaagtatggttagagatcttgttgatgtttcagtaagattagtcaaggcacagaaaaaatcattggtacaagatgaagcaacagctaaggccaatgaaaaacttgttaagttattagttccaagtatgaaaaagaaagcgtctcaaacgaataatcctttagagtcacttttcggaggtgcaattccaaatttcggacaaaataacgaagatgaagaagaaccacctactgaggaaattaaaacaaaacgttctgaaattaagagacagctagaagaaggcaaacttgaaaaagaaaaggtaagaattaaagtcgaacaagatcctggtgctttaggtatgctaggtacaaatcaaaatcagcaaatgcaagagatgatgaatcaattaatgcctaaaaagaaagttgagcgagaagttgctgttgagacggcaaggaaaatcttagctgatagttatgcggatgaactaattgatcaagaaagcgctaaccaagaagcgcttgaattagcagaacaaatgggtatcatctttatagatgaaatcgacaaagttgcgacgaataatcataatagtggtcaagatgtctcaagacaaggtgttcaaagagatattttacctatacttgaaggtagcgttattcaaaccaaatatggtactgtgaatactgaacatatgctgtttataggtgctggagctttccatgtatctaagccgagtgacttgataccagaattgcaaggtcgttttccgattagagttgaacttgatagtttatcggtagaagattttgtaagaattttgacagaaccaaaattgtcattaattaaacaatatgaagcattgcttcaaacagaagaagttactgtaaactttaccgatgaagcaattactcgtttagctgagattgcttatcaagtaaatcaagatacagacaacattggtgcacgtcgacttcatacaattttagaaaagatgttagaagatttatcattcgaagcaccaagtatgccgaatgcagttgtagatattaccccacaatatgttgatgataaattaaaatcaatttcaacaaataaagatttaagtgcatttattctataaaaatatacaaaaggagaaaaattcatgagcttattatctaaaacgagagagttaaacacgttacttcaaaaacacaaaggtattgcggttgattttaaagatgtagcacaaacgattagtagcgtaactgtaacaaatgtatttattgtatcgcgtcgaggtaaaattttagggtcgagtctaaatgaattattaaaaagtcaaagaattattcaaatgttggaagaaagacatatcccaagtgaatatacagaacgattaatggaagttaaacaaacagaatcaaatattgatatcgacaatgtattaacagtttttccacctgaaaacagagaattattcatagatagtcgtacaactatcttcccaattttaggtggaggagaaagattaggtacattagtacttggtcgagtacatgatgattttaatgaaaatgatttggtactaggtgaatatgctgctacagttattggtatggaaatcttacgtgagaagcatagtgaagtagaaaaagaagcgcgcgataaagctgctattacaatggcaattaattcattatcttattctgaaaaagaagcgattgaacatatctttgaagaacttggcggtacggaaggcctattaatcgcatcaaaagttgcagatagagttggtattactagatctgtaattgtaaatgcactacgtaaattagaaagtgctggtgtaattgaatcacgttctttaggaatgaaaggtactttcattaaagttaaaaaagaaaaattcttagatgaattagaaaaaagtaaataagtcgatgagtctgggacataattcaatgtcctagtcgtgacgatgttatcttggcggtagtcaacgaaatgactttgatgattatgttgaagtcatttctttatttttgtctaattttcaatcaaattgatattccacattaacatgatagaattacctttaaatttatgaaaaaattcttgaaaaacatttgctttagacacggcattatgttatatttattttcggctataaagccaatacacacatatcaaacgtgattgtgtaaagggtgcaatatttgtatattgtctttacaatagtttgctatggaggtaattaaccaataggaggaatttataatggcagtaatttcaatgaaacaattactagaagcgggtgttcacttcggtcaccaaacacgtcgttggaacccaaaaatgaaaaaatatatcttcactgagagaaatggtatttatatcatcgacttacaaaaaacagtgaaaaaagtagacgaggcatacaacttcttgaaacaagtttcagaagatggtggacaagtcttattcgtaggaactaaaaaacaagcacaagaatcagttaaatctgaagcagaacgtgctggtcaattctacattaaccaaagatggttaggtggattattaactaactataaaacgatctcaaaacgaatcaaacgtatttctgaaattgaaaaaatggaagaagatggtttattcgaagtattacctaaaaaagaagtagtagaacttaaaaaagaatacgaccgtttaatcaaattcttaggcggaattcgtgatatgaaatcaatgcctcaagcattattcgtagttgacccacgtaaagagcgtaatgcaattgctgaagctcgtaaattaaatattcctatcgtaggtatcgttgacactaactgtgatcctgacgaaattgactacgttatcccagcaaacgacgatgctatccgtgcggttaaattattaactgctaaaatggcagatgcaatcttagaaggtcaacaaggcgtttctaatgaagaagtagctgcagaacaaaacatcgatttagatgaaaaagaaaaatcagaagaaacagaagcaactgaagaataatcaactgttgaatctgacttagatatagtttaaatgggtgataagatattaatgcttatcaccttttttaaaaagaaaatcgaggcaaattacaaatattcaattagagtattagcaatcttgcctataataatgctaaaatcataatatataaaatgataacttattggaggaataatgaatggcaactatttcagcaaaacttgttaaagaattacgtgaaaaaactggcgcgggtatgatggattgtaaaaaagcgctaactgaaactgatggtgacatcgataaagcgattgattacctacgtgaaaaaggtattgctaaagcagctaaaaaagcagaccgtattgcggctgaaggtttagtacatgtagaaactaaaggtaacgacgcagttatcgttgaaatcaactctgaaacagactttgttgctcgtaacgaaggattccaagagttagttaaagaaatcgctaatcaagtattagatacaaaagctgaaactgttgaagctttaatggaaacaactttaccaaatggtaaatcagttgatgaaagaattaaagaagcaatttcaacaatcggtgaaaaattaagtgttcgtcgttttgctatcagaactaaaactgataacgatgctttcggcgcttacttacacatgggtggacgcattggtgtattaacagttgttgaaggttcaactgacgaagaagcagcaagagacgttgctatgcatatcgctgcaatcaaccctaaatatgtttcttctgaacaagttagcgaagaagaaatcaaccacgaaagagaagttttaaaacaacaagcattaaatgaaggtaaaccagaaaacatcgttgaaaaaatggtggaaggacgtttacgtaaatacttacaagaaatttgtgctgtagatcaagacttcgttaaaaaccctgatgtaacagttgaagctttcttaaaaacaaaaggtggaaaacttgttgacttcgtacgctatgaagtaggcgaaggtatggaaaaacgcgaagaaaactttgcggatgaagttaaaggacaaatgaaataatctgtcataaagtaaaacaaggaagaagacacctttaatgttgctttattaaaatgtaaatcattctaataaaacgacaactgtgtcttctttacttgtatatgttacatatattcacgatagagaggataagaaaatggctcaaatttctaaatataaacgtgtagttttgaaactaagtggtgaagcgttagctggagaaaaaggatttggcataaatccagtaattattaaaagtgttgctgagcaagtggctgaagttgctaaaatggactgtgaaatcgcagtaatcgttggtggcggaaacatttggagaggtaaaacaggtagtgacttaggtatggaccgtggaactgctgattacatgggtatgcttgcaactgtaatgaatgccttagcattacaagatagtttagaacaattggattgtgatacacgagtattaacatctattgaaatgaagcaagtggctgaaccttatattcgtcgtcgtgcaattagacacttagaaaagaaacgcgtagttatttttgctgcaggtattggaaacccatacttctctacagatactacagcggcattacgtgctgcagaagttgaagcagatgttattttaatgggcaaaaataatgtagatggtgtatattctgcagatcctaaagtaaacaaagatgcggtaaaatatgaacatttaacgcatattcaaatgcttcaagaaggtttacaagtaatggattcaacagcatcctcattctgtatggataataacattccgttaactgttttctctattatggaagaaggaaatattaaacgtgctgttatgggtgaaaagataggtacgttaattacaaaataaatttagaggtgtaaaataatgagtgacattattaatgaaactaaatcaagaatgcaaaaatcaatcgaaagcttatcacgtgaattagctaatatcagtgcaggaagagctaattcaaatttattaaacggcgtaacagttgattactatggtgcaccaacacctgtacaacaattagcaagcatcaatgttccagaagcacgtttacttgttatttctccatacgacaaaacttctgtagctgacatcgaaaaagcgataatagcggctaacttaggtgtcaacccaacaagtgatggtgaagtgatacgtattgcagtacctgccttaacagaagagcgtagaaaagagcgcgttaaagatgttaagaaaattggtgaagaagctaaagtatctgttcgaaatattcgtcgtgatatgaatgatcagttgaaaaaagatgaaaaaaatggcgacattactgaagatgagttgagaagtggtactgaagatgttcagaaagcaacagacaattcaataaaagaaattgatcaaatgattgctgataaagaaaaagatattatgtcagtataaaactaatatacaatgacatattaaaatgccagtattaaacgataatgtaacatttaaaatgggcatgtttaattaaatcaaagatgcatgtgatgatttaaattcacaatgagcataaaaatggtgtttaaacaagttaattaaacatatactttataaataataggcattaggtatattgctataataaagttatgtaatttttaacctcagtatgtatgtcacatttctggtgtaaactgtaccgagtcagactttggtacagtttttttatttgcttattcaatgcattaaatgagtatgataaaatgataatgattgtttagtaacttatactatatgacagagatgatcaggctcggaggaaagaccatgtttaaaaagctaataaataaaaagaacactataaataattataatgaagaattagactcgtctaatatacctgaacatatcgctattattatggatggtaatgggcgatgggctaagaagcgaaaaatgcctagaattaaaggtcattacgaaggtatgcaaacaataaaaaaaattactagggtagctagtgatattggtgttaagtacttaactttatacgccttttccactgaaaattggtcaagacctgaaagtgaagtaaattatattatgaatttgcctgtcaatttcttaaagacattcttaccggaactaattgaaaaaaatgtcaaagttgaaacaattggatttactgataagttgccaaaatcaacgatagaagcaattaataatgctaaagaaaagacagctaataataccggcttaaaattaatatttgcaattaattatggtggcagagcagaacttgttcatagtattaaaaatatgtttgacgagcttcatcaacaaggtttaaatagtgatatcatagatgaaacatatataaacaatcatttaatgacaaaagactatcctgatccagagttgttaattcgtacttcaggagaacaaagaataagtaatttcttgatttggcaagtttcgtatagtgaatttatctttaatcaaaaattatggcctgactttgacgaagatgaattaattaaatgtataaaaatttatcagtcacgtcaaagacgctttggcggattgagtgaggagtagtatagtatgaaagttagaacgctgacagctattattgccttaatcgtattcttgcctatcttgttaaaaggcggccttgtgttaatgatatttgctaatatattagcattgattgcattaaaagaattgttgaatatgaatatgattaaatttgtttcagttcctggtttaattagtgcagttggtcttatcatcattatgttgccacaacatgcagggccatgggtacaagtaattcaattaaaaagtttaattgcaatgagctttattgtattaagttatactgtcttatctaaaaacagatttagttttatggatgctgcattttgcttaatgtctgtggcttatgtaggcattggttttatgttcttttatgaaacgagatcagaaggattacattacatattatatgcctttttaattgtttggcttacagatacaggggcttacttgtttggtaaaatgatgggtaaacataagctttggccagtaataagtccgaataaaacaatcgaaggattcataggtggcttgttctgtagtttgatagtaccacttgcaatgttatattttgtagatttcaatatgaatgtatggatattacttggagtgacattgattttaagtttatttggtcaattaggtgatttagtggaatcaggatttaagcgtcatttcggcgttaaagactcaggtcgtatactacctggacacggtggtattttagaccgatttgacagctttatgtttgtgttaccattattaaatattttattaatacaatcttaatgctgagaacaaatcaataaacgtaaagaggagttgctgagataatttaatgaatctcagaactccttttgaaaattatacgcaatattaactttgaaaattagacgttatattttgtgatttgtcagtatcatattataatgacttatgttacgtatacagcaatcatttttaaaataaaagaaatttataaacaatcgaggtgtagcgagtgagctatttagttacaataattgcatttattattgtttttggtgtactagtaactgttcatgaatatggccatatgttttttgcgaaaagagcaggcattatgtgtccagaatttgcgatcggtatgggaccgaaaatttttagttttagaaaaaacgaaacactttacactattaggttattgcctgttggtggatatgttcgtatggcaggagatggcttagaagagccaccagtcgagcccggtatgaacgttaaaattaaactgaatgaagaaaatgaaataacacatatcatattagatgatcatcataagtttcaacaaattgaagcaatcgaagttaaaaaatgtgattttaaggatgacttattcatagaaggtatcactgcttatgataatgaaagacatcattttaaaattgctagaaagtctttctttgttgaaaatggtagcttagttcaaattgctccgagagacagacaatttgcacataaaaagccatggccgaaatttttaacattatttgcgggaccgttatttaactttatattagctttagtcctatttattggtcttgcatattatcaaggcacgcctacgtctactgtagaacaagtcgcagataagtatccagctcaacaagcaggattacaaaaaggtgataagatcgtccaaattggcaaatataaaatatctgaatttgatgatgttgataaggcgttagataaagttaaagataataagacgactgttaaatttgaacgtgatggtaaaacaaagtcagttgaattaacacctaaaaagactgaaagaaaactgactaaagtaagttcagagacgaagtatgttctcggattccaaccagcgagtgaacgtacgctcttcaaaccaattgtatatggatttgaaagctttttgaaaggtagtacactaatttttacagctgtagtcggtatgttggctagtatatttacgggcggattctcatttgatatgttaaatggtccggttggtatttatcataacgtcgactcagttgttaaagcgggtatcattagcttaattggttacactgcgttattaagtgtaaacttaggtattatgaatttaattcctattcctgcactagacggtggtcgtattttatttgttatatatgaagcgattttcagaaaaccagttaataaaaaagcggaaacaacgattattgctattggtgccattttcatggtcgttattatgatattagtaacgtggaatgatattcgacgatatttcttataatttaggaggataaataattatgaagcaatccaaagtttttataccaacgatgcgtgatgtgccatcagaagcagaagcacaaagtcatcgtttattattgaaatcgggtttgataaaacaaagtacaagtgggatttatagttatttaccgctagcaacacgtgtgttaaataatattactgcaattgtgcgacaagaaatggaacgtatcgattctgttgaaattttaatgccagcgttacaacaagctgaattatgggaagaatcaggacgttggggtgcatatggcccagaattaatgcgtttacaagatagacatggaagacaatttgcattaggtccaacacatgaagaattagttacatcaatagtaagaaatgaattgaaatcatacaaacaattaccgatgacattattccaaattcaatctaaattccgtgatgaaaagagaccacgttttggtttacttcgtgggcgtgaatttattatgaaagatgcgtattcattccatgctgacgaggcatcattagatcaaacgtatcaagatatgtatcaagcgtatagccgtatttttgagagagttggcattaacgcaagaccagtagttgcagattcaggtgctataggcggtagccatacacatgaatttatggcattaagtgctatcggtgaggatacaatcgtttacagtaaagaaagtgactatgctgctaatatcgaaaaagcagaagtcgtttacgaaccaaatcataagtattctactgtgcaacctttagaaaaaattgaaacaccaaatgttaagactgcacaagaattggcagacttcttaggtagaccagtagatgaaatcgttaaaacgatgattttcaaagttgatggcgaatatattatggttttagtgcgtggccatcatgaaattaatgacattaaattaaaatcttatttcggcacagataatattgaattagcaacacaagacgaaattgttaatttagttggtgcaaatccgggttcactaggtcctgttattgataaagaaatcaaaatttatgcagataattttgtgcaagatttaaataatttagttgtcggtgctaacgaagatggctatcacttaattaatgtaaatgtaggtagagacttcaacgttgatgaatatggcgatttccgttttattttagaaggcgaaaagttaagtgatggttcaggcgttgcacattttgctgaaggtattgaagttggtcaagtattcaaattgggtactaagtattcagaatcaatgaatgctacattcttagataaccaaggaaaagcccaacctttaattatgggttgttacggtattggaatttctagaacgctgagtgcgattgttgaacaaaatcacgatgataatggaattgtttggcctaaatcagttactccatttgatttacatttaatttctattaatcctaagaaagatgatcaacgagaactagcggatgcactatatgctgaatttaatactaaatttgatgtgttgtacgatgatcgtcaggaacgtgcgggtgtcaaatttaatgatgccgatttaattggtttaccactgcgaattgttgttggtaaacgtgcatcggaaggtattgtagaagttaaagaacgtttaacaggtgatagcgaagaagttcacattgatgacttaatgactgtcattacaaataaatatgataacttaaaataattaagatcgaatgaattataagagtaggaaaaagctgaaagaaatcagatgcttatgtcctgctcttattatttttgatataatgattattcgatgaaaaatgactgaagacatagtataattaaagataaatttgttttaacaatattatgattagccaaatataaagcatttaattttctatcattactatgcctacataatctaaatattgttcgaacacgtaaaagtaatttctatttaaggtggtaattgtcttggcaatgacagagcaacaaaaatttaaagtgcttgctgatcaaattaaaatttcaaatcaattagatgctgaaattttaaattcaggtgaactgacacgtatagatgtttctaacaaaaacagaacatgggaatttcatattacattaccacaattcttagctcatgaagattatttattatttataaatgcaatagagcaagagtttaaagatatcgccaacgttacatgtcgttttacggtaacaaatggcacgaatcaagatgaacatgcaattaaatactttggacactgtattgaccaaacagctttatctccaaaagttaaaggtcaattgaaacagaaaaagcttattatgtctggaaaagtattaaaagtaatggtatcaaatgacattgaacgtaatcattttgataaggcatgcaatggaagtcttatcaaagcgtttagaaattgtggttttgatatcgataaaatcatcttcgaaacaaatgataatgatcaagaacaaaacttagcttctttagaagcacatattcaagaagaagacgaacaaagtgcacgattggcaacagagaaacttgaaaaaatgaaagctgaaaaagcgaaacaacaagataacaacgaaagtgctgttgataagtgtcaaattggtaagccgattcaaattgaaaatattaaaccaattgaatctattattgaggaagagtttaaagttgcaatagagggtgtcatttttgatataaacttaaaagaacttaaaagtggtcgccatatcgtagaaattaaagtgactgactatacggactctttagttttaaaaatgtttactcgtaaaaacaaagatgatttagaacattttaaagcgctaagtgttggtaaatgggttagggctcaaggtcgtattgaagaagatacatttattagagatttagttatgatgatgtctgatattgaagagattaaaaaagcgacaaaaaaagataaggctgaagaaaagcgtgtagaattccacttgcatactgcaatgagccaaatggatggtatacccaatattggtgcgtatgttaaacaggcagcagactggggacatccagccattgcggttacagaccataatgttgtgcaagcatttccagatgctcacgcagcagcggaaaaacatggcattaaaatgatatacggtatggaaggtatgttagttgatgatggtgttccgattgcatacaaaccacaagatgtcgtattaaaagatgctacttatgttgtgttcgacgttgagacaactggtttatcaaatcagtatgataaaatcatcgagcttgcagctgtgaaagttcataacggtgaaatcatcgataagtttgaaaggtttagtaatccgcatgaacgattatcggaaacgattatcaatttgacgcatattactgatgatatgttagtagatgcccctgagattgaagaagtacttacagagtttaaagaatgggttggcgatgcgatattcgtagcgcataatgcttcgtttgatatgggctttatcgatacgggatatgaacgtcttgggtttggaccatcaacgaatggtgttatcgatactttagaattatctcgtacgattaatactgaatatggtaaacatggtttgaatttcttagctaaaaaatatggcgtagaattaacgcaacatcaccgtgccatttatgatacagaagcaacagcttacattttcataaaaatggttcaacaaatgaaagaattaggcgtattaaatcataacgaaatcaacaaaaaactcagtaatgaagatgcatataaacgtgcaagacctagtcatgtcacattaattgtacaaaaccaacaaggtcttaaaaatctatttaaaattgtaagtgcatcattggtgaagtatttctaccgtacacctcgaattccacgttcattgttagatgaatatcgtgagggattattggtaggtacagcgtgtgatgaaggtgaattatttacggcagttatgcagaaggaccagagccaagttgaaaaaattgccaaatattatgattttattgaaattcaaccaccggcactttatcaagatttaattgatagagagcttattagagatactgaaacattacatgaaatttatcaacgtttaatacatgcaggtgacacagcgggtatacctgttattgcgacaggaaatgcacactatttgtttgaacatgatggtatcgcacgtaaaattttaatagcatcacaacccggcaatccacttaatcgctcaactttaccggaagcacattttagaactacagatgaaatgttaaacgagtttcattttttaggtgaagaaaaagcgcatgaaattgttgtgaaaaatacaaacgaattagcagatcgaattgaacgtgttgttcctattaaagatgaattatacacaccgcgtatggaaggtgctaacgaagaaattagagaactaagttatgcaaatgcgcgtaaactgtatggtgaagacctgcctcaaatcgtaattgatcgattagaaaaagaattaaaaagtattatcggtaatggatttgcggtaatttacttaatttcgcaacgtttagttaaaaaatcattagatgatggatacttagttggttcccgtggttcagtaggttctagttttgtagcgacaatgactgagattactgaagtaaacccgttaccgccacactatatttgtccgaactgtaaaacgagtgaatttttcaatgatggttcagtaggatcaggatttgatttacctgataagacgtgtgaaacttgtggagcgccacttattaaagaaggacaagatattccgtttgaaacatttttaggatttaagggagataaagttcctgatatcgacttaaactttagtggtgaatatcaaccgaatgcccataactacacaaaagtattatttggtgaggataaagtattccgtgcaggtacaattggtactgttgctgaaaagactgcttttggttatgttaaaggttatttgaatgatcaaggcatccacaaaagaggtgctgaaatagatcgactcgttaaaggatgtacaggtgttaaacgtacaactggacagcatccagggggtattattgtagtacctgattacatggatatttatgattttacgccgatacaatatcctgccgatgatcaaaattcagcatggatgacgacacattttgatttccattctattcatgataatgtattaaaacttgatatacttggacacgatgatccaacaatgattcgtatgcttcaagatttatcgggcattgatccaaaaacgatacctgtagatgacaaagaagtcatgcaaatatttagtacacctgaaagtttaggtgttactgaagatgaaattttatgtaaaacaggtacgtttggggttccagaattcggtacagggttcgtgcgtcaaatgttagaagatacaaagccaacaacattttctgaattagttcaaatctcaggattatctcatggtacagatgtgtggttaggcaatgctcaagaattaattaaaaccggtatatgtgatttatcaagtgtaattggttgtcgtgatgatatcatggtttatttaatgtatgctggtttagaaccatcaatggcttttaaaataatggagtcagtacgtaaaggtaaaggtttaactgaagaaatgattgaaacgatgaaagaaaatgaagtgccggattggtatttagattcatgtcttaaaattaagtacatgttccctaaagcccatgcagcagcatacgttttaatggcagtacgtatcgcatatttcaaagtacatcatccactttattactatgcatcttactttacaattcgtgcgtcagactttgatttaatcacgatgattaaagataaaacaagcattcgaaatactgtaaaagacatgtattctcgctatatggatctaggtaaaaaagaaaaagacgtattaacagtcttggaaattatgaatgaaatggcgcatcgaggttatcgcatgcaaccgattagtttagaaaagagtcaggcgttcgaatttatcattgaaggcgatacacttattccgccgttcatatcagtgcctgggcttggcgaaaacgttgcgaaacgaattgttgaagctcgtgacgatggcccatttttatcaaaagaagatttaaacaaaaaagctggattatctcagaaaattattgagtatttagatgagttaggctcattaccgaatttaccagataaagctcaactttcgatatttgatatgtaaaatgaaataatcaaggtatttatttaatgcgtatggcgtagttaaagaaatacaaaattgttgctggacataaaattatgcctgtatttcttttcaacgtcttacgagtctattcgaatgtaatggtgaaataaatgaacaaacttttacaagaatctctgattaatagtgaagtcatttgtttcaagcataaacttatgctataattaagttgcttaaaaattagtgaactcaggcagaagagtgggagattcccgctcttttctatttgccaaaaagggaggcctgtatgagtaaaattacagaacaagtagaagtgattgttaaaccaattatggaagacttgaattttgaacttgtagacgttgaatatgtcaaagagggtagagatcattttcttagaatctctattgataaagaaggtggcgtagatttaaatgattgtacgctagcttctgaaaaaataagtgaagctatggatgcaaatgatcctattcctgaaatgtattatttagacgtagcgtcacctggtgcagaacgtccaattaaaaaagaacaagatttccaaaatgcaataactaaacctgtatttgtttctttatatgtaccaattgaaggtgaaaaggaatggttaggcattttacaagaagtcaataatgaaacaattgtagtacaagttaaaatcaaagcaagaacgaaagatatagagataccgagagacaaaatagcaaaagcacgtcacgcagttatgatttaacgtgatgaggaggaaaaaacgtgtcaagtaatgaattattattagctactgagtatttagaaaaagaaaagaagattcctagagcagtattaattgatgctattgaagcagctttaattactgcatacaaaaagaattatgatagtgcaagaaatgtccgtgtggaattaaatatggatcaaggtactttcaaagttatcgctcgtaaagatgttgttgaagaagtatttgacgacagagatgaagtggatttaagtacagcgcttgttaaaaaccctgcatatgaaattggtgatatatacgaagaagatgtaacacctaaagattttggtcgtgtaggtgctcaagcagcgaaacaagcagtaatgcaacgtcttcgtgatgctgaacgtgaaattttatttgaagaatttatagacaaagaagaagacatacttactggaattattgaccgtgttgaccatcgttatgtatatgtgaacttaggtcgtatcgaagctgttttatctgaagcagaaagaagtcctaacgaaaaatatattcctaacgaacgtatcaaagtatatgttaacaaagtggaacaaacgacaaaaggtcctcaaatctatgtttctcgtagccatccaggtttattaaaacgtttatttgaacaagaagttccagaaatttacgatggtactgtaattgttaaatcagtagcacgtgaagctggcgatcgctctaaaattagtgtcttctctgaaaacaatgatatagatgctgttggtgcatgtgttggtgccaaaggcgcacgtgttgaagctgttgttgaagagctaggtggcgaaaaaatcgacatcgttcaatggaatgaagatccaaaagtatttgtaaaaaatgctttaagcccttctcaagttttagaagttattgttgatgaaacaaatcaatctacaatagttgttgttcctgattatcaattgtcattagcgattggtaaaagaggacaaaacgcacgtctagctgctaaattaaccggctggaaaattgatattaaatcagaaacagatgcgcgcgaagcgggtatctatccagtagttgaagctgaaaaagtaactgaagaagatgttgctttagaagatgctgacacaacagaatcaaccgaagaggtaaatgatgtttcagttgaaacaaatgtagagaaagaatctgaataataggttggagtgaagtatctatgaaaaagaaaaaaattccgatgcgaaaatgtattctttcaaatgaaatgcatcccaaaaaagatatgattcgtgttgttgttaataaagaaggcgaaatctttgcggatgttactggaaagaaacaaggccgtggcgcatatgtttctaaagatgttgctatggttgaaaaagcacaacaaaaagaaattttagaaaaatattttaaagcatctaaagagcaattggatcctgtttataaagaaattattagattaatttatagagaagagatcccaaaatgagtatagatcaaatattaaactttttaggattagcaatgagagctggtaaagtaaaaacaggtgaatcagtcattgttaatgagataaaaaaaggaaatttaaagctcgttattgttgcaaatgatgcgtctgataatacagctaaattaattacagataaatgtaagagttacaaagttccattcagaaagtttggaaatcgaaatgaattgggaatagcacttggaaaaggtgagcgtgttaatgtagggattactgacccaggctttgctaaaaagttgctatcaatgatagatgaatatcataaggagtgattatatgagtaaacaaagaatttacgaatatgcgaaagaattaaatctaaagagtaaagagattatagatgagttaaaaagcatgaatattgaggtttcaaatcatatgcaagctttggaagatgaccaaattaaagcattagataaaaagttcaaaaaagaacaaaagaacgacaataaacaaagcactcaaaataatcaccaaaaatcaaacaatcaaaaccaaaataaagggcaacaaaaagataacaaaaagaatcaacaacaaaataataaaggcaacaaaggcaataaaaagaataatagaaataataagaaaaataacaagaataataaaccacaaaatcaaccagctgctccaaaagaaataccatcaaaagtgacatatcaagaaggtattacagtaggcgaatttgcggataaattaaatgttgaatcatcagaaattatcaaaaaattattcttacttggtattgttgctaatatcaatcaatcattaaatcaagaaacaatcgaattaattgccgatgattatggcgttgaggttgaagaggaagttgtgattaatgaagaagatttatcaatctacttcgaagacgaaaaagatgatccagaagcaattgagagaccagcagttgtaacaattatgggacatgttgaccatggtaaaactactttattagattcaattcgtcatacaaaagttacagcaggtgaagcaggtggaatcactcaacatattggtgcatatcaaattgaaaacgatggcaaaaaaatcactttcttagatacaccgggacatgctgcatttacaacgatgcgtgcgcgtggtgcacaagtaacagatattacaattttagtagtagcagctgacgatggtgttatgccacaaacaattgaagcaattaaccatgctaaagaagcagaagtaccaattattgttgcagtaaataaaattgataaaccaacttcaaatcctgatcgagttatgcaagaattaactgaatatggtttaattcctgaagattggggtggcgaaacaattttcgttccactttctgcattaagtggtgatggtatcgacgatttattagaaatgataggattagttgcagaagttcaagaacttaaagcaaatcctaaaaaccgtgctgttggtacagttatcgaagctgaattagataaatcacgtggtccttctgcatcattattagtacaaaacggtacattaaatgttggggatgcgattgtagttggtaatacttacggccgtattcgtgcaatggttaatgacttaggtcaaagaatcaaaatggctggtccatcaacgcctgttgaaattacaggtattaatgatgtgccacaagctggggatcgctttgttgtatttagtgatgaaaaacaagctcgtcgtattggtgaatcaagacacgaagctagcattgttcaacaacgtcaagaaagtaaaaatgtttcattagataacctgtttgaacaaatgaaacaaggtgaaatgaaagatttaaacgttattattaaaggtgatgttcaaggttctgttgaagctttagctgcatcattaatgaaaattgatgttgaaggcgtaaatgttcgtatcattcatacagcggttggtgcaattaatgagtcagacgtgacacttgctaatgcctcaaatggtattatcattggtttcaatgttcgtccagacagtggtgcaaaacgtgctgcagaagctgaaaatgttgatatgcgtttacacagagttatttataatgttatcgaagaaattgaatcagcgatgaaaggtttacttgatccagaatttgaagaacaagttatcggacaagctgaagttcgtcaaacattcaaagtttctaaagttggtactattgctggatgttatgttactgaaggtaaaattacgcgaaatgctggtgtacgtattattcgtgatggtattgttcaatatgaaggcgaattagatacacttaaacgtttcaaagatgatgctaaggaagttgcaaaaggttatgaatgtggtattacaattgaaaactacaatgaccttaaagaaggcgatgttatcgaagcatttgaaatggttgaaattaagcgttaattaaataaattacaagctaaaagtatagttaagattgatatgctccctataaatattgcactttttaagtgtctactttatagggagcatatttgatactagcttttggttttttattagaatagattacctattaaaagttacgttatatggacatgattttgtataaaattttgtggtggcctagaatgatttttaatgacaaaatataatgtcgactattattggaaaattttctgttgaaatgcctatcttacggcaaactttatttgattttataggcttaatttattaaaataacgtgtgagctaaaataattgtttaagcattgttacactaaaaaatgcaaataacaattgaacttaaagataaagaggtgacaagaatgagcagtatgagagcagagcgtgttggtgaacaaatgaagaaggaattaatggatatcatcaacaataaagtcaaagatcctcgagttggttttattacaattacagatgttgttttaacaaatgatttatcgcaggctaaagtatttttaactgtattaggtaacgataaagaagtagaaaatacatttaaagcacttgataaagcaaaaggcttcattaagtctgaattaggttctagaatgcgattacgtattatgccggaattaatgtatgaatatgatcaatcaatcgaatatggcaataaaattgaacgaatgattcaagatttacacaaacaagatagataatttagtgttaggtatctggaaaatgtttgataatttcttaatatcggtatattaacattaaacagttaatacatagatgtgtagaaatagttaacattttccagtttttttatgaataaattcagttgatacgctattaaaatatattttaaaaaaagaaggtgactatatgtataatgggatattaccagtatataaagagcgcggtttaacaagtcatgacgttgtattcaaattgcgtaaaatattaaaaactaaaaaaataggtcacacgggtacgcttgatcccgaagttgcaggcgtgttaccggtatgtataggtaatgcaacgagagttagtgattatgttatggatatgggcaaagcttatgaagcaactgtatcgataggaagaagtacaacgactgaagatcaaacgggtgatacattggaaaaaaaaggtgtacactcagcagattttaataaggacgatattgaccgattgttagaaagttttaaaggtatcattgaacaaattccgccgatgtactcatccgtcaaagtaaatggtaaaaaattatatgaatatgcgcgtaataatgaaacagttgaaagaccaaagcgtaaagttaatattaaagacattgggcgtatatctgaattagattttaaagaaaatgagtgtcattttaaaatacgcgtcatctgtggtaaaggtacatatattagaacgctagcaactgatattggtgtgaaattaggctttccggcacatatgtcgaaattaacacgaatcgagtctggtggatttgtgttgaaagatagccttacattagaacaaataaaagaacttcatgagcaggattcattgcaaaataaattgtttcctttagaatatggattaaagggtttgccaagcattaaaattaaagattcgcacataaaaaaacgtattttaaatgggcagaaatttaataaaaatgaatttgataacaaaattaaagaccaaattgtatttattgatgatgattcagaaaaagtattagcaatttatatggtacaccctacaaaagaatcagaaattaaacctaaaaaagtctttaattaaaggagatagaatttatgaaagtcatagaagtgacacatcctatacaatcaaaacagtataatacagaggatgttgcaatggcattcggatttttcgatggcatgcataaaggtcatgacaaagtctttgatatattaaacgaaatagctgaggcacgcagtttaaaaaaagcggtgatgacatttgatccgcatccgtctgtcgtgttgaatcctaaaagaaaacgaacaacgtatttaacgccactttcagataaaatcgaaaaaattagccaacatgatattgattattgtatagtggttaatttttcatctaggtttgctaatgtgagcgtagaagattttgttgaaaattatataattaaaaataatgtaaaagaagtcattgctggttttgattttacttttggtaaatttggaaaaggtaatatgactgtacttcaagaatatgatgcgtttaatacgacaattgtgagtaaacaagaaattgaaaatgaaaaaatttctacaacttctattcgtcaagatttaatcaatggtgagttgcaaaaagcgaatgatgctttaggctatatatattctattaaaggcactgtagtgcaaggtgaaaaaaggggaagaactattggcttcccaacagctaacattcaacctagtgatgattatttgttacctcgtaaaggtgtttatgctgttagtattgaaatcggcactgaaaataaattatatcgaggggtagctaacataggtgtaaagccaacatttcatgatcctaacaaagcagaagttgtcatcgaagtgaatatctttgactttgaggataatatttatggtgaacgagtgaccgtgaattggcatcatttcttacgtcctgagattaaatttgatggtatcgacccattagttaaacaaatgaacgatgataaatcgcgtgctaaatatttattagcagttgattttggtgatgaagtagcttataatatctagagttgcgtatagttatataaacaatctataccacacctttttcttagtaggtcgaatctccaacgcctaactcggattaaggagtattcaaacattttaaggaggaaattgattatggcaatttcacaagaacgtaaaaacgaaatcattaaagaataccgtgtacacgaaactgatactggttcaccagaagtacaaatcgctgtacttactgcagaaatcaacgcagtaaacgaacacttacgtacacacaaaaaagaccaccattcacgtcgtggattattaaaaatggtaggtcgtcgtagacatttattaaactacttacgtagtaaagatattcaacgttaccgtgaattaattaaatcacttggtatccgtcgttaatcttaatataacgtctttgaggttggggcatatttatgttccaaccttaatttatattaaaaaagctttttacaaatattaacatttattatatgttaagctaatattgagtgaataataaggttacaatgagataaatatgatataagtacacctagagtaataatcaagatattaaaaataaagtatgttttaaaaaaatataacttatatttatactgataagggtgggacgataagtctattttgtaaataatagatggatatcccgctctctttttttccaattcaatattttataactaatattaaaatacgataataaatgatatgatataactattagattcaagagaggagatttataatgtctcaagaaaagaaagtttttaaaactgaatgggcaggaagatctttaacgattgaaacagggcaattagctaaacaagcaaatggcgctgtattggttcgttatggagatacagtcgtgttatcgacggcaactgcatcaaaagaacctcgtgatggagatttcttcccattaacagtgaactatgaagaaaaaatgtacgctgcgggtaaaattcctggtggatttaaaaagagagaaggacgtcctggtgacgatgcaacattaactgcgcgattaattgatagaccaattagacctttattccctaaaggatataagcatgatgttcaaattatgaacatggtattaagtgcagatcctgattgttcaccacaaatggctgcaatgattggttcatctatggcgcttagtgtgtcggatattccattccaagggccaatcgccggtgtaaatgtgggttatattgacggtaaatatatcattaacccaacagtagaagaaaaagaagtttctcgcttagaccttgaagtagctggtcataaagatgcagtaaacatggtagaggcaggcgctagtgagattactgaacaagaaatgttagaggcgattttctttggtcatgaagagattcaacgtttagttgatttccaacaacaaatcgtcgaccacattcaacctgttaaacaagaatttattccagtagagcgtgatgaagcgctagttgaacgtgtaaaatctttaaccgaagaaaagggacttaaagaaacagttttaacatttgataaacaacaacgagatgaaaatcttgataacttaaaagaagaaatcgtcaatgaatttatcgatgaagaagatccagaaaatgaattacttattaaagaagtttatgcaattttaaatgaattagtgaaagaagaagttcgacgtttaattgcagatgaaaaaattagaccagacggccgtaaacctgatgaaatccgtccattagattctgaagttggtattttacctagaacgcatggttcaggtctatttacacgtggtcagactcaagcactttcagttttaacattaggtgctttaggcgattatcaattaattgatggtttaggacctgaagaagaaaaaagattcatgcatcattacaacttcccgaatttttcagtaggtgaaactggtccagtacgtgcgccaggtcgtcgtgaaattggacatggtgcgttaggtgaaagagcattaaaatatattattcctgatactgctgatttcccatatacaattcgtattgtaagtgaggtacttgaatcaaatggttcatcatctcaagcgtcaatttgtggatcaacattagcattaatggatgcgggcgtaccgattaaagcaccagttgctggtattgctatgggccttgttacacgtgaagatagctatacgattttaactgatatccaaggtatggaagatgcattaggtgatatggactttaaagtcgctggtactaaagaaggtattacagcaatccaaatggatattaaaattgacggtttaacgcgtgaaattatcgaagaggctctagaacaagcgagacgtggtcgtttagaaataatgaatcatatgttacaaacaattgatcaaccacgtactgaattaagtgcttacgcgccaaaagttgtaactatgacaattaaaccagataagattagagatgttatcggacctggtggtaaaaaaattaacgaaattattgatgaaacaggcgttaaattagatattgaacaagatggtactatctttattggtgccgttgatcaagctatgataaatcgcgctcgtgaaatcattgaggaaattacacgtgaagcggaagtaggtcaaacttatcaagccactgttaaacgtattgaaaaatacggtgcgtttgtaggcctattcccgggtaaagatgcgttgcttcacatttcacaaatttcaaaaaatagaattgaaaaagtggaagatgtattaaaaatcggtgacacaattgaagttaagattactgaaattgataaacaaggtcgagtaaatgcttcacacagagcattagaagaataatatttaaagtcatatgacgacaatgtatcgtcatgtgatttttttatgccattttttacgaagtgatccaatttgaatttgttgtattgaacattttaaaacgctttattattttgtgtgcaactgttaattatcctgtatgtatagtgattaatagtgtacatcaagtgttttttaacttataatgaatagtgagtttatatatggacgggtaacaaatttaggaggtaagattttgagtttaataaagaaaaagaataaagatattcgcattataccattaggcggtgttggcgaaattgctaaaaatatgtatatcgttgaagtagacgatgaaatgtttatgttagatgctggacttatgtttccagaagacgaaatgctaggtattgatattgttataccagacatttcatacgtacttgaaaataaagataaattgaagggtatattccttacacacggacatgagcacgcgattggtgcagtgagttatgttttagaacaattagatgcaccagtatatggatctaaattgacaatagcgttaattaaagaaaatatgaaagcccgtaatattgataaaaaagttcgctactacacagttaataatgattcaattatgagattcaaaaacgtgaatattagtttctttaatacgacacacagtattcctgatagtctaggtgtttgtattcacacttcatatggtgccattgtgtatacaggtgaatttaagtttgaccaaagtttacatggacattatgcaccagatattaaacgtatggcagagattggtgaagaaggtgtatttgtcttaatcagtgattctactgaggcagagaaacctggatataatactccggaaaatgtgattgaacatcatatgtatgacgcttttgcaaaagtgcgaggtcgcttgattgtttcatgttatgcttcgaactttatacgtatacagcaagttttaaatattgctagcaagctaaatcgtaaagtgtcatttttaggaagatcacttgaaagttcatttaatattgctcgtaaaatggggtatttcgacattcctaaagatttgctaattcctataacagaagttgataattatcctaaaaatgaagtgataattatagctactggtatgcaaggagaacctgtagaagccttaagtcaaatggcgcaacataagcataaaattatgaatatcgaagaaggcgattctgtatttttagcaattacggcttctgcaaatatggaagttatcattgcgaatacattaaatgagcttgtacgtgctggcgcacatattattccaaataacaagaagattcatgcttcaagtcatggttgcatggaagaattaaaaatgatgattaatattatgaaacctgaatactttattcctgtacaaggtgaatttaaaatgcagatagcacatgcgaagctagcagctgaagcaggtgttgcaccagaaaagattttccttgtggaaaaaggagatgtcattaattacaacggtaaagatatgatattaaatgaaaaggtaaattcaggaaatattttaatagatggtattggtattggggatgtaggaaatatcgtgttgagagaccgtcatcttttagcagaagatggtatctttattgctgtagtaacgttagatcctaaaaatagacgtatagctgcgggacctgaaattcaatctcgtgggtttgtatatgtacgtgaaagtgaagacttattacgtgaagcagaagagaaagtacgtgaaatagtagaggctggtttacaagaaaaacgcatagaatggtctgaaattaagcaaaatatgcgtgatcaaattagtaaactattattcgaaagtacaaaacgtcgtcctatgattattccagtaatttctgaaatttaatcaaaaagtcattaacataaaagaggtcagaacaagtcactgaaatataatggttgtcatggacaatttacttatattttatgatggtcaattgaaaggggtaacgattaatctgttatcttaagtaaattgatacatagatgatattgttctaacctctttcatcgtctgtttggactacatattctaaacatcaaataggaaattatatataataacgtcgttttaactaaggcaacataaggaggtgcgtcaattggcacaagcaaaaaagaaatcgacagctaagaaaaaaacaacatcaaaaaaaagaacaaattcgaggaaaaagaagaatgataatccgatacgttatgtcatagctattttagtagttgtattaatggtgttgggtgttttccaattaggaataataggtcgtctaattgacagcttctttaattatttatttgggtacagtagatatttaacatatattttagtactcttagcaactggttttattacatactctaaacgtattcctaaaactagacgaacggctggttcgattgtattgcaaattgcattgctatttgtatcacagttagtttttcattttaatagtggtatcaaagctgaaagagaacctgtactttcttatgtgtatcagtcataccaacacagtcatttcccaaattttggtggcggtgtattaggcttttatttattagagttaagcgtacctttaatttcattatttggtgtatgtattattactattttattattatgctcaagtgttattttattaacaaaccatcaacatcgtgaagtcgcaaaagttgtactggaaaatataaaagcttggtttggttcatttaatgaaaaaatgtcggaaagaaaccaagaaaaacaattgaagcgtgaagaaaaagcgagacttaaagaagaacaaaaggcacgtcaaaatgaacagccacaaataaaagatgtgagtgattttacggaagtgcctcaagaaagagatattccaatttatgggcatactgaaaatgaaagtaaaagtcagagtcaaccaagtcggaaaaagcgagtgtttgatgcagagaatagttcgaataacatcgtaaatcatcatcaagcagatcagcaagaacaattaacagaacaaactcataacagtgttgaaagtgaaaacactattgaagaagctggtgaagttacgaatgtatcgtatgttgttccaccgttaactttacttaatcaacctgcaaaacaaaaagcaacatctaaagctgaagtgcaacgtaaaggacaagtactagagaatacattaaaagattttggggtaaatgcaaaagtgacacaaattaaaattggtcctgcagtaactcaatatgaaattcaaccagctcaaggggttaaagtgagtaaaattgtaaacttgcataatgatattgcattagctttagcagcaaaagatgttagaatcgaagcgccaatacctggtcgctctgcagtaggtattgaagtgccaaatgagaaaatttcattagtttcactaaaagaagttttagatgaaaaattcccgtctaataataaactagaagttggattaggaagagatatatcaggtgatccaattactgttccactaaatgaaatgccacacttattggtggcaggatcgacgggtagtggtaaatctgtttgtataaatggtattattacaagtattttattaaatgctaagccgcatgaagttaaacttatgttaatcgatccgaaaatggttgaactaaatgtttataacggaattccacatttattaattccggttgttacaaatcctcataaagctgctcaagctttagaaaaaattgtagctgagatggaaagacgttatgatttattccaacattcatcaactagaaatattaaaggttataacgaattaatccgtaagcaaaatcaagaattagatgagaagcaaccagaattaccttatatcgttgttattgtagatgagcttgcagatttaatgatggtagctggtaaagaagttgaaaatgcgattcaacgtattacacaaatggcacgtgcagcaggtatacatttaattgtagcgacacaaagaccttctgtggatgtaattacaggtatcattaaaaataatattccatctagaattgcttttgctgtaagttctcaaacagattcaagaactattattggtactggcggcgcagaaaagttacttggtaaaggtgacatgttatacgttggaaatggtgattcatcacaaacacgtattcaaggggcgtttttaagtgaccaagaggtgcaagatgttgtaaattatgtagtagaacaacaacaggcaaattatgtaaaagaaatggaaccagatgcaccagtggataaatcggaaatgaaaagtgaagatgctttatatgatgaagcgtatttgtttgttgttgaacaacaaaaggcaagtacatcattgttacaacgccaatttagaattggttataatagagcatctaggttgatggatgatttagaacgcaatcaggtaatcggtccacaaaaaggaagcaagcctagacaagttttaatagatcttaataatgacgaggtgtaaaaaaatgtcagaaatgaatgcggtatataacgttaaacaatacattttaaatttgattaagcaaaataaattggaatatggtgaccaacttccaagtaatttatcaattgccagagaattaaatgtaaaaaccgacgatgtttatgaagcaattcaggcattgattactgaacaagtcattaaagataattttgaagagggcacaagtgttaagtcactgccccctttcttttatccattgaatgaacttataagtattgggcaaatgattaaaaatgcaggatttgaatgcggaactgaatacttaaattttgatgagcaaccagcaactatgttagatgcaaatttgttgagcgttgaagaaggatatccagtaaccattatagaacgattacgaactgccgatggagaaccggtcgtctattgtttagataaaattgctaaaaaagaattaacatgtacagagtatcaaatgagcaatggatcgatactaagtgcgataaaagaacaaagtaatcataatatttgttacgctgatacagaaattgaagcggtaaattatgaacctcgaatatccgaagtactgaatgcttcgccacacgaaggtttgattttattaaaaattacgcactacaatgaattagatgaacctattttgtattcattaaattatatgaaaaatagcttagttcaatttaaaatcactagaaaaatatagatgtaagaagatatagaggaggctatatatttgagtagacaatctcaaccaaatatacatatcaaagtttcaccaacaactaaatttaaaacaactactatagtttttaaatttatggcacctttagaatatgacacaactacagctagatcattattaagcaaattattagttcgagcaactaagaaatggccaaccgataagtcgtttaataatcacttagccgatttatatggtgcatatgtgaatagtacaatttcaaaattcaaagatcagcatgtcattacattttcattagaaattgtaaatgaacgttatttaagaaacggtgaatcattatttaatcaaggattagatttattacaagaaatcatttggaatccattaattgaaaataaagcattcaatgataattttgttaaccaagagaaaacattattagccaaaaaaatagaagcaatggtagataacaaagcacaatattcgtttttaaaattactcgaccatatgtttgaaaatgaagcatacaaatacttatctacaggacaactagaacaaatcccacatattactgctgaaacactatatcatacatatcaatcaatgattaataatgatcaatgttctgtttatgttgtcggcaatgtagaacctgaaagtgttgagaaacaaatacgtgaaaaatttgcacttaaaccattcgataaacatcaattccaacattctacacatcatttacacgatgaagaagttgattatattgttgaatatgatgacgtggatcaagctaaattaaatatgggatatcgttttccaacacaatatggacaaagtggatatgctgcttttgttgtatttaacatgatgtttggaggagatccttcatctgttttatttaatgaagtgcgagaaaagcaaagtttagcgtactctatacattcacaaattgatggcaaaaatggctatttatttgttttgagtggggtttcaagtgataagtacgaaactgcaaaagacactattataagtgaatttgaaaaaataaaagcaggagatttcactgaagaaaaattagagttagctaaaaaagtaatcatttctcatcgatatgaatctgaagatcgtccgaaaagtattatagagattatgcataaccaaatattattagagcaaccacaaagcaaagaaacatttataaatgatatacagaaggtaagtcgcgaagatattgtttctgttgctgaaaaagcatttttagatacaatctatgtgttgacaaaaggaggggataaataatgaaagagcgttattatgaattaatagacgaaagagtattcgaacaagaattagaaaatggtttacgattatttgttatccctaaaccaggttttcaaaagacatttgtcacttacactacacaatttggttcattagataatcaattcaaacccctcggacaagaccaatttgttactgtacctgatggagttgctcactttttagaacataaattatttgaaaaagaagaagaagacttatttactgcatttgctgaagataatgcacaagcaaatgcgtttacaagctttgatcgtacaagctacttgttcagtgcaactgataatattgaaaacaacattaaacgtttacttacaatggttgaaacgccttattttacaaaagaaactgttgataaagaaaaaggtattattgcagaagaaataaaaatgtatcaagagcaacctggatataaattaatgtttaatacattgcgtgcaatgtatcaacaacatccaatacgtgttgatattgccggtagtgtagaaagtatatacgatattacaaaagatgatttgtatctatgttatgaaacgttttatcatccatcaaatatggttttatttgttgttggcgatgtggatcctgaagcaatatgtcgaatagtaaaacaacacgaggatgctcgtaataaagttaaccaacccaaaatcgaacgaggacttgttaatgaaccggaggatgttaaagaagcatttgttactgaatctatgaaaattcaatcaccaagactaatgcttggttttaaaaataaaccattacaagaagcgcctcaaaaatatgtacaacgtgatttagaaatgtcattattctttgagttaatttttggggaagaaacagatttttatcagaatttattaaacgaaggacttatcgatgatacatttggttatcaatttgtactagagccgacttatagtttttcaatcgtgacaagcgctactgaagaaccagataaattaaaaaaattattattagatgagttgcgtgataaaaaaggcaatttccaagatgcagaagcatttgaacttttgaaaaagcaatttataggtgaattcatatcaagtttaaactcacctgaatatattgctaatcaatatactaaattgtattttgaaggtgttagcgtgtttgacatgttagacattgttgaaaatatcaccttagatagtattaacgaaacgtcatcgttatatttaaatttagatcagcaagtcgatagtcgtttggagattaaaaagtaatgaaagcattagtattaggtggttctggttcaattggttctgagatagtcaaacaattattaactgatggatttgaagtttatgtgcaatattatcgtactgatataaatgaattaactagcaaatttaatgatgataaagttcgttttatacaagcggatttatctcaaacaattgatattgacaaaacatttggtgacattaaatcattagactgtttaatatatgcaagtggtcagtctttatatggtgttttacaagatatgaaagaccatgatattgatgcatgttatcagttaaatgtcttgcaattaattcgattatgtagatatttcgttgatgttttacgtcaaagtgacaatggaagaattattgtaatttcatcaatttggggtgagacaggagctagtatggaaactatttattcgacgatgaaaagtgcacaattaggtttcgttaaggcgcttagtcaagagcttgcactaacatcagtgacagtaaatgctatcgcacctggatttgtagccggtaatatggcaagtgagtggcaagaagatgaacttcaagcaatgataactgaattaccacaacagcgattgattttaccgagtgaggttgctcatacatgcgcctatttatatcacccaaatgctagaagtgttactggaactatacagaaagttaatggtgcttggtatatttaaaatatagaactatttttatgagcaaatgtttttatgattgatgttataatatgaatattacaatgaatcataatttgttaattaaacaaggggtgaggttcaccatgacagttgcagagaaaaaagaatggtacctagaatacgaaattgaaattaatagaccgggtcttttaggtgatgtatctagtttattaggtatgttaggtataagtattgttacaattaatggtgttgatcaaggtaaacgaggccttttaattaaaacagacaatcttgaaaaagttgaacgttttgagcaaatagctcgtggtataaatgaaattgaaataacaaagcttaaaaaaccagaattaagagaccgtcttgcagtaagacatggtagatatattgagcaagatgcaaaagataagaaaacctttcgatttgagcgtgaagatttaggcttgttagtagactttttagctgaattgttcaaagaagaaggtcataagttgattggcattagaggtatgccacgagttggtaaaactgaatcaattgttgcgggaagtgtttgtgcacataagagatggttatttattagttctactttaataaaacaaactgtacgtagctctctaattaaaggggaatatgatgccaatcatgtatacattattgatggtgcagttactgccagagaatctaatccaaaacatcaagagcttgttaacgaagttatgacgttaccatcaatcaaagtcgttgaacatccagatttatttgttgaaacaagtacttgtacaatggaagattttgactatattatcgaattgagagaaaatgaaaatcaagaaatacattacgaagaaatgaagaaacagacagtccaaagtaagaataatttagattttggagatccgtttggtggtggttttggtttcttcgagtaagtgtaaggaggctatgaattgaaaacggtcggtgaagcgctaaaaggtagacgtgaaaggttaggaatgactttaacagaattagagcaacgtactggaattaaacgtgaaatgctagtgcatattgaaaataatgaattcgatcaactaccgaataaaaattacagcgaaggatttattagaaaatatgcaagcgtagtaaatattgaacctaaccaattaattcaagctcatcaagatgaaattccatcgaaccaagccgaatgggacgaagtaattacagttttcaataataataaagacttagattataagagtaaatcaaaagagccaatacaattattagtaatcatgggtattacagttttaataactttattgttatggatcatgttagttttaatattttaacagaaataaattagtgagaaatgaggatgtataatgaatattccgaaccagattacggtttttagagtagtgttaataccagtttttatattgtttgcgttagttgattttggatttggcaatgtgtcatttctaggaggatatgaaataagaattgagttattaatcagtggttttatttttatattggcttcccttagcgattttgttgatggttatttagctagaaaatggaatttagttacaaatatggggaaatttttggatccattagcggataaattattagttgcaagtgctttaattgtacttgtgcaactaggactaacaaattctgtagtagcaatcattattattgccagagaatttgccgtaactggtttacgtttactacaaattgaacaaggattcgtaagtgcagctggtcaattaggtaaaattaaaacagcagttactatggtagcaattacttggttgttattaggtgatccattggcaacattgattggtttgtcattaggacaaattttattatacattggcgttatttttactatcttatctggtattgaatacttttataaaggtagagatgtttttaaacaaaaataaatatttgtttatactagatttcattttcatatggaatctagtttttttaatcccaattttagaaattagccacgcaattgtttataatgatatattgtaaaacaatattcgttcatttttttagggaaaatctgtagtagcatctgatacattgaatctaaaattgatgtgaatttttaaatgaaatacatgaaaaaatgaattaaacgatacaagggggatataaatgtcaattgccattattgctgtaggctcagaactattgctaggtcaaatcgctaataccaacggacaatttctatctaaagtatttaatgaaattggacaaaatgtattagaacataaagttattggagataataaaaaacgtttagaatcaagtgtacgtcatgcgctagaaaaatatgatactgttattttaacaggtggcttaggtcctacgaaagatgacttaacgaagcatacagtggcccagattgttggtaaagatttagttattgatgagccttctttaaaatatattgaaagctattttgaggaacaaggacaagaaatgacacctaataataaacaacaggctttagtaattgaaggttcaactgtattaacaaatcatcatggcatggctccaggaatgatggtgaattttgaaaacaaacaaattattttattaccaggtccaccgaaagaaatgcaaccaatggtgaaaaatgaattgttgtcacattttataaaccataatcgaattatacattctgaactattaagatttgcgggaataggtgaatctaaagtagaaacaatattaatagatcttatcgataaacagactaatcctacgattgcgcctttggcgggaagtcatgaagtatatattagattgactgcaaatgccgactcaaaagaacaagcacaatcattgattcaacctgttaaacaagaaattcttgatcgtattggagaatattattatggttcagatgacacattaattgagcaagctgtaataaagaaaattcatgaaccttttgtaatatatgatggtattactaatggtgctttatatcatcgattgaaagaagtggatttaaacgatgttctaaagggtatgattaatcacaatgaaaactttgttgatattaataaacctattgagcagcaattaaaagatgcagtgcaatttgttaataaattgtttaatgtgtcatcagcaattattctattagagtatgatggtgtagtccatataggctatgataataactttgaatttaaaactgagcaatttaaaatgtctaaatctagaaatttattaaagaacagaagtcaaaattatgcgctcataagattattaaattggcttagaacaacaaattaattgtattatcgataaaaatataagcacgtttgttcgtttttgcgttttgatttcaagattttatacgaacaaatattcgcaaaacacttgtattttattttgaatccttgtatagtattggtaagataattaaaagatagcaatttcaattaggaggtctcgctttggataacgatcgtcaaaaagctttagatacagtaattaaaaatatggagaaatctttcggtaaaggtgccgtaatgaagttgggtgacaatataggtcgccgagtttcaactacatcaactggttcagttacattagataatgcgctaggtgtaggtggctatcctaaaggacgaattattgaaatttatggtcctgaaagttctggtaagacaacagtagcgcttcacgctattgctgaagtacaaagtaatggcggggtggcagcatttatcgatgctgaacatgctttagatccagaatatgctcaagcattaggcgtagatatcgataatttatatttatcgcaaccggatcatggtgaacaaggtcttgaaatcgccgaagcatttgttagaagtggtgcagttgatattgtagttgtagactcagttgctgctttaacacctaaagctgaaattgaaggagaaatgggagacactcacgttggtttacaagctcgtttaatgtcacaagcgttacgtaaactttcaggtgctatttctaaatcaaatacaactgctattttcatcaaccaaattcgtgaaaaagttggtgttatgttcggtaatccagagactacaccaggtggacgtgcattaaaattctatagttcagtaagactagaagtacgtcgtgcagaacagcttaaacaaggacaagaaattgtaggtaatagaactaaaattaaagtcgttaaaaataaagtggcaccaccatttagagtagctgaagttgacattatgtatggacaaggtatttctaaagagggtgaacttattgatttaggtgttgaaaacgacatcgttgataaatcaggagcatggtattcttacaatggcgaacgaatgggtcaaggtaaggaaaatgttaaaatgtacttgaaagaaaatccacaaattaaagaagaaattgatcgtaaattgagagaaaaattaggtatatctgatggtgatgttgaagaaacagaagatgcaccaaagtcattatttgacgaagaatagtacacaaatttatatctatagttaaacttagcaaatatccttataggattgattgaaagtgatattcatctcataaagctagaataatatctaactttatgggatacactacaaatcgagactataaggttttttattttatttattattacattatcaatagttttataatcgagcttcaaaactttagaaaatagtagaaatagcattcaatatagtgcaaaagtgcaaattgataacttgacacttatctcctataaaccgtacaattaatttgtatgatttatatataatttcataaagtcatattgaatttcatataaagagcaaaccctagaaaaggaggtgtttgtgtgaatttattaagcctcctactcattttgctggggatcattctaggagttgttggagggtatgttgttgcccgaaatttgttgcttcaaaagcaatcacaagctagacaaactgccgaagatattgtaaatcaagcacataaagaagctgacaatatcaaaaaagagaaattacttgaggcaaaagaagaaaaccaaatcctaagagaacaaactgaagcagaactacgtgaaagacgtagtgaacttcaaagacaagaaacccgacttcttcaaaaagaagaaaacttagagcgtaaatctgatctattagataaaaaagatgagattttagagcaaaaagaatcaaaaattgaagaaaaacaacaacaagtagatgcaaaagagagtagtgttcaaacgttaataatgaagcatgaacaagaattagaacgcatctccggtctcactcaagaagaagctattaatgagcaacttcaaagagttgaggaagaactgtcacaagatattgcagtacttgttaaagaaaaagaaaaagaagctaaagaaaaagttgataaaacagcaaaagaattattagctacagcagtacaaagattagcagcagatcacacaagtgaatcaacggtatcagtagttaacttacctaatgatgagatgaaaggtcgaatcattggacgagaaggacgaaacatccgcacacttgaaactttaactggcattgatttaattattgatgacacaccagaagcggttatattatctggttttgatccaataagaagagaaattgctagaacagcacttgttaacttagtatctgatggacgtattcatccaggcagaattgaagatatggtcgaaaaagctagaaaagaagtagacgatattattagagaagcaggtgaacaagctacatttgaagtgaacgcacataatatgcatcctgacttagtaaaaattgtagggcgtttaaactatcgtacgagttacggtcaaaatgtacttaaacattcaattgaagttgcgcatcttgctagtatgttagctgctgagctaggcgaagatgagacattagcgaaacgagctggacttttacatgatgttggtaaagcaattgatcatgaagtagaaggtagtcatgttgaaatcggtgtagaattagcgaaaaaatatggtgaaaatgaaacagttattaatgcaatccattctcatcatggtgatgttgaacctacatctattatatctatccttgttgctgctgcagatgcattgtctgcggctcgtccaggtgcaagaaaagaaacattagagaattatattcgtcgattagaacgtttagaaacgttatcagaaagttatgatggtgtagaaaaagcatttgcgattcaggcaggtagagaaatccgagtgattgtatctcctgaagaaattgatgatttaaaatcttatcgattggctagagatattaaaaatcagattgaagatgaattacaatatcctggtcatatcaaggtgacagttgttcgagagactagagcagtagaatatgcgaaataatttttgtctccctcacaaattagtgagggagcttttttaagttgtagtcttaatctagttagacagcactttatcggtaataactatattaaacagtagttatttgaaagtaagacggaccttatattaaataagaagttattgcttttaataaaaatgttttaggcttcgtaattactatatttatattatgtaaacctataaagatgattgcttttctatccaataaaaaagaagagaagatgtaacacatcttctcttctgcaatattaattaggatttatttctaagttgagttattttaattgtaaatctgttttctttaattcttttataacttctgcagtatcataacaatttgttgcaattgttgaatatctctctgctaaacgatatgcattaatgtaaagctttaaactttctttagctatatcctctgcatcttcgaattttgatgggttagacataaccactaattctgcaaatttttctggatcaatattaatagacatgtatttatttacaactcctatttattttgatgtcttaatactaacatattgaagttttcagacaaagtaatgtctctttataattgaagaaaaataattcaaagaatttaatatttactttaaatattagaacgtatgaattaaactagtatttatgagaggatgaacaaaacatgagaataatgtttataggggatatcgtaggtaaaattggacgagacgcaattgaaacgtacatacctcaactgaagcaaaagtataaaccaacagttacaattgtaaatgctgaaaatgcagcacatggtaaaggtttgactgaaaaaatatataaacaattactaagaaatggtgtagatttcatgactatgggtaatcacacatatggtcaacgtgaaatttatgattttatagatgaagcaaaacgtctagtaagaccagcgaattttccggatgaagcgccgggaattggtatgagatttatacaaattaatgatattaaacttgcagttattaatctgcaaggaagagcgtttatgccagatattgatgatccttttaaaaaggcagatcaattagtcaaggaagcacaagaacaaactccgtttatatttgttgattttcatgcagaaacaacttctgaaaagtatgcaatgggatggcatttagatggtagagctagcgctgttgttggaacgcatacacacattcaaacagcagatgaacgtattttaccaaaggggacagggtatataacggatgttggtatgacaggtttttatgacggcattttaggaataaataaaacagaggtaattgagcgttttatcactagtttgccacaaagacatgttgttccaaatgaaggtagaagtgtattatctggtgttgttattgatttagacaaagaaggtaaaacaaagcacatcgaacgtatattgataaatgatgaccatccattttcaacattttaaaattacgtaagtaaacattcgaattggaccctatcgtccattagtatgaatttaatatagtaccactgtttacatagtaaatcggtggttctttttgttatcatttaatatgaaatatatccataggaggcatataactatgaaaccacaattatcgtggaaagttggcggtcaacaaggcgaaggtattgaatcaactggggaaatcttcgctacggctatgaatagaaaaggatattatttatatggatatagacatttttcaagtcgtatcaaaggtggacatacgaataataaaattagagtttctacgacgcctgttcatgcaattagtgatgatttagatattttgattgcatttgaccaagaaacaattgatgttaaccatcatgaaatgagagaagacagtattattttagctgatgccaaggctaaacctgtgaaaccagaaggatgtcatgcacagcttattgaattaccttttacagcaaccgctaaagaattaggtacagcattaatgaaaaacatggttgcaataggtgctactagcgcattgatgaatttgaatacaaatacatttgaagaacttattactaatatgttttctaaaaaaggtgacaaggtagttgaagtcaatatccaagcattaaacgaaggttatcaattaatgcaatcccgcttacctgaaatcgacggggactttgaattagagtcaacagatgcactaccacatctatatatgattggtaacgatgccattggattaggtgcaattgctgcaggttcacaatttatggcggcatatcctattacacctgcgtctgaagttatggaatatatgattgccaatatatctaaagtaaacggagcggttattcaaacagaagatgaaattgctgctgtaactatggctattggtgcaaattatggtggagtcagagcgtttacggctagtgctggtccaggtttatctttaatgatggaagcaattggattatctggtatgactgaaacgccattagtcattattaatactcaacgaggtggaccttctactggattacctacgaaacaagaacagtcagatttaatgcaaatgatttatggtacacatggtgatattccaaaaatagttgtagcaccaactgatgcagaagatgcattttatttaactatggaagcctttaatttagcagaacaatatcaatgccctgttatagttttaagtgatttgcaattatctttaggtaaacaaactgttgaaaaattagattataatcgcattgaaattaaacgtggtgaaatcattcaatctgatattgaacgtgaagaagatgataaaggttatttcaagcgttatgcgttaacatccaatggtgtttctcctagacctatccccggtattaaaggaggtattcatcatataactggtgtggaacacaatgaagaaggtaaacctagtgaatctgcatcaaatagacaacaacaaatggaaaaacgaatgcgtaaaattgagcagttactaattgaatcgccagtagaagctaacttacaacatgaagatgcagatattctttatatcggttttatttctacaaaaggtgcaattcaagaaggtagtaaccgtttgaatcaacaaggcataaaagttaacactatacaaattagacaattgcatccattcccaacaagcgttattcaagatgcagttaataaagcgaagaaagtcgttgtagtggagcacaattatcaaggacaattggctagtattataaaaatgaatgtcaatattcatgataagattgaaaattatacaaagtatgatgggacacctttcctaccacatgaaatcgaagtaaaaggcaaaataattgctactgaaataaaggagatggtatagatggcgacatttaaagattttagaaataatgttaagcctaactggtgccctggatgtggcgatttctcagtacaagctgcaattcaaaaagcagccgcaaatatagggttagaacctgaagaagtagctatcatcaccggtataggatgttctggccgtctttcaggatatattaattcttatggcgttcattctattcacggacgtgcattacctttagctcaaggtgtaaaaatggcgaataaagatttaactgttattgcatctggaggagatggtgatggttatgctataggtatggggcatacaatccatgctttaagaagaaatatgaacatgacgtatatagtcatggataatcaaatttatggtttgacaaagggacaaacatcgccgtcatcagcagtaggatttgttactaaaacaacgccaaaaggtaatatagaaaaaaatgttgcgcctttagaattagcattatcatctggtgccacatttgtagcccaaggtttttcaagcgatattaaaggattaacaaaactaattgaagatgcaattaatcatgatggattttcattcgttaatgtcttttcaccatgtgtgacttataataaaattaacacatacgattggtttaaagaacatttaacaagtgttgatgacattgaaaattatgattctacagataaacaattagcgactaaaactgttattgaacatgaatctttagtaactggtattgtttatcaagataaagaaacaccatcatatgaatctcaaattaaagagttagatgatacaccacttgctaaaagagatatcaaaattactgaagacaccttcaatgcattaactgaacaatttatttaataattaaaactgagtcgtataaatgtatttataacagatccatttatgctactcagttttttactattacaaaaaataaaggagtttttaaaaatgaaagacacattaatgagtatacaaataattcctaaaacaccaaacaatgacaatgttataccttacgtagacgaggcgattaaaataattgacgaatctggtatgcattttagagtaggtccgttagaaacgacagtacaaggaaatatgaatgaatgtttaattttaatacaatcattaaatgaacgaatggtggaacttgaatgtccaagtattattagccaagttaagttttatcatgtgccagatggcatcactattgaaactttaactgaaaaatatgatgaataacattaaaagtgaagtaaactggatttgaattggcttgttagagatgacgtataactttaactgtttttgcactttatagttaaatttaatataattattaaatgatacgggcaaatagaaaggattttgtaaagtgaacgaagaacaaagaaaagcaagttctgtagatgttttagctgagagagataagaaagcagaaaaagattatagtaaatattttgaacatgtttatcagccgcctaatttaaaagaagcaaaaaaaagaggtaaacaagaagttcgttataatagagattttcaaattgatgaaaaatatcgcggtatggggaacgagcgtacatttttaattaaaacatatggatgtcaaatgaatgcacatgacactgaggtcattgctggtatacttgaagcattaggctatcaagcaacgactgatattaacactgcagatgttattttaattaatacatgtgcgattagagaaaatgccgagaacaaagtgtttagtgaaataggtaatttgaagcatttgaaaaaagaacgacctgatattttaatcggtgtttgtggttgtatgtcacaagaagagtcagtagtgaataaaattttaaaatcgtatcaaaatgtagatatgatatttggtacacataatattcatcatttaccagaaattttagaagaagcatacttatctaaagcaatggttgttgaagtatggtctaaagaaggagacgttattgaaaatcttccaaaagtccgtgaaggcaacattaaagcatgggtcaatattatgtatggttgtgataagttttgtacatattgcattgttccatttacaagaggtaaagaacgaagccgcagacctgaagacattatagatgaagtacgtgaacttgctcgtgaaggttacaaagaaataacgcttttaggtcaaaatgtaaattcttatggtaaagatttacaggatatagaatatgacttaggagatcttttacaagcaatttctaaaatagcgattccaagagttcgtttcacaacaagtcatccttgggactttacagatcacatgattgatgttatttcagagggtggtaatatcgttcctcatatccacttgccagttcaatctggaaataatgcagtattaaaaataatgggtagaaaatatacacgagaaagttatttggatttagtaaaacgaatcaaagatagaattcctaatgtagcattaactacagatattattgtagggtatccaaatgaatcagaggaacaatttgaagaaactttaactctgtatgatgaagttggttttgaacatgcatatacgtatttgtattcacaacgtgatggtacgcctgctgctaaaatgaaagataatgtacctttaaatgtcaaaaaggaacgattgcaacgtttgaataaaaaagttggtcattattcacaaatagctatgagtaagtacgaaggacaaactgtaacagtactttgtgaaggtagtagtaaaaaagatgatcaggttcttgctggctacactgataaaaataagctagttaatttcaaagcgcctaaagaaatgattggtaaactagtggaagtacgaatagatgaagctaaacagtattcattaaatggcagttttgtaaaggaagtagagccggaaatggtgattcaataaatgtataataaagatgacgtgttgaaacaagcggataatattgcaaataaaattaaaaatttggatactatcaaaacatatcaacaaattgaagcacagattcatcagaaccaaacgataaagactaaaatggatatgttaaaaaagcatcaaaaacaagcagtaaactttcaaaattacgggaaacaaaatgcgctagaacagtcggaacataccattcaaagtatagaagcagaaataaatacattgcccatagttgaacagtttcaaacttcacaatatgaagcgaatcaattattgaaaatgtttgtatcaacaatggaaacacgtttaaatgaccataataaagccaagcatagtgattaattacaaacaaaaaggagaacaatcatatgaaatcaagaaaactggctataactgcacttttaattgcaataaatgttgtattaagcagtattatcatcattcctctaggaccagttaaggcagcaccagtacagcattttgtaaatgtattaagtgcggtcatagtaggtccttggtatggattagctcaagcgcttatatcatcaattttaagagttctttttggtactggtacagcttttgcatttccaggtagtatgattggagttttattggctagtatgttttacatatatcgtaaacatatattcatggccgcggtcggtgaagtacttggaactggtgtcatcggaagtttaatttgtataccattagcatatttccttgggcttcaagacttcttcattaaaccgttaatgattacgttcatagtctcaagtgctatcggatctattataagttatttcttattaattactctaaaaaaacgtggtattcttcaaaggtttataaaataattttatgatatatgatttcaaacagagtcattgttcattttaatattgaacgcccttacttaattaaatgtcttgaatgttagaattttaatttaattctaaacatgctattgacacattttattaggtttgaggcgttttcttatacatttaagatgcttcgtgattatatggtatgaataggtttgtaaaagtaagtatgttaaaatgtataagttaaataattaataattaaaaagcttacaaacgaatatattgtaaagacaaattttaaaaagagacaagggttgtgaagaaataatatgtctaatgttacaccaatgatgcagcaatatttaaaaataaaatcagaataccaagattgcttattattttttagactaggtgatttctatgaaatgttttatgaagatgccaaggaggcatcacgtgtacttgaaattactttaactaaaagagatgctaaaaaagaaaatccaattccgatgtgtggtgttccgtatcattctgcagatagttatatagatacacttgttaataatggatataaagtagctatttgtgaacagatggaagatccgaaacaaacgaaaggtatggttagacgtgaggtagtaagaattgtgactccaggaactgtgatggagcaaggtggtgtagatgataaacaaaataactatattttaagttttgttatgaatcaacctgaaattgcgcttagttactgtgatgtttctactggcgaattaaaggttacacattttaatgatgaagcgactttattaaatgaaattacgacgataaaccctaacgaagttgttatcaatgacaatatttccgataatttaaaaagacaaattaatatggtgacagaaacaataacagtcagggaaacgttatcatcagaaatctatagtgtgaatcaaactgaacataaattaatgtatcaagcgacacaattattgctagattatattcatcatacacaaaaacgtgatttatcgcatatcgaggatgttgttcaatatgcagctatagattatatgaaaatggatttttatgctaagagaaaccttgagttaacggaaagcattcgattaaaatcaaaaaaaggaacgctactttggctaatggacgaaacgaaaacaccaatgggagcacgccgcttaaaacaatggatagatagaccactaataagtaaagaacaaattgaagcacgattagatatcgttgatgaatttagtgctcatttcatagaaagagacaccttaagaacatatcttaatcaagtgtatgatattgaacgtcttgttgggcgtgttagttacggaaatgttaatgcgagagatttaattcaacttaaacattccatttctgaaataccgaatattaaagcattactaaattctatgaatcagaatacgcttgtacaagttaatcaactagaaccccttgatgatttacttgatatattagaacagagtttagtagaagaaccaccaatttcagttaaagatggcggactattcaaagttggttttaatacgcaattagatgaatatcttgaagcttcaaaaaacggaaaaacatggttagcagaattacaagccaaagaaagacaacgtacaggaataaaatcattgaaaataagctttaataaagtgtttggttattttatagaaataacacgtgccaacttgcaaaattttgaaccaagtgaatttggttatatgaggaagcaaacgttatcgaatgctgaacgttttataactgatgaacttaaagaaaaagaagatatcattttaggtgcggaagacaaagccatcgaattagaatatcaattatttgttcagctacgtgaagaagttaaaaaatatactgaacgtttacaacaacaagctaaaattatttcagagctagattgtttacagagctttgcagaaattgctcaaaaatataattacactaggccttcatttagtgaaaataaaacattagaattagtggaatctaggcacccagtagtggaaagagtaatggattataatgactatgtgcctaataattgtcgattagataatgaaacatttatatatttaattacaggtccgaatatgtctggtaaatcgacatatatgagacaagttgccataattagtataatggcccaaatgggagcttatgtcccttgtaaagaggcagtgttacctatatttgatcaaatattcactagaataggtgcggcagatgatttggtttcaggtaagagtacgtttatggtagaaatgctagaagcacaaaaggcattaacttatgcaacagaggatagtttgattattttcgatgaaattggacgtggtacttcaacgtatgacggtttagctttagcgcaggcaatgatagagtatgtagctgaaacatcacatgctaaaacgttattttcaacacattatcatgaattgacaacattagatcaagcattaccaagtctaaaaaatgttcacgtcgctgctaatgaatataaaggtgaacttatattcttgcataaagtcaaagatggtgcagttgacgatagttatggtattcaagttgcgaaattagctgatttacctgaaaaagttattagcagagcacaagtgattctaagcgagtttgaagcgtctgctggtaaaaaatcatcgatatcaaatttaaaaatggtcgaaaatgaacctgaaattaatcaagaaaatttaaacttaagtgttgaagaaacaactgatactttatctcaaaaagactttgaacaagcatcatttgatttgtttgaaaatgatcaagaaagcgagattgaactacaaattaaaaatttgaatttatctaatatgacaccaattgaggcattggtgaagttaagtgaattacaaaatcaattaaaatagaggtgttgcaaaatggggaaaattaaagaactccaaacctcattagcaaataaaatcgcagcaggtgaagtagttgaaagaccgagttctgttgtgaaagaactgttggaaaatgctatagatgcaggcgctacagaaataagcattgaagtagaggaatctggcgtccaatctattcgcgtagtcgataatggaagcggaattgaagcggaagacttaggattagtatttcatagacatgcgactagtaaattagatcaagatgaagatttatttcatattaggacattaggattccgtggtgaagcactagccagtatttcatcagttgctaaagtaacattgaagacttgcacggataatgctaatggaaatgaaatatatgtagaaaatggtgaaatattaaatcataagcctgcaaaagcgaaaaaaggaacagatatacttgtagaatcattattttataatacaccagcacgtttaaaatatattaaaagtttatacactgaactaggtaaaataacagatattgtcaacagaatggcaatgagccatccggacattcgaatagcactcatttcagatggcaaaacaatgttaagtacaaatggttcaggacgaactaatgaagtgatggcagagatttatgggatgaaagttgcacgagatttagtacatatatctggagatacaagtgattatcacattgaaggttttgttgcaaagcctgaacattctagaagtaataagcactatatttctatttttattaatggacgatacattaaaaactttatgctaaataaagcgattttagaaggctatcatacactcttaacaataggtaggttcccgatttgttatattaatattgaaatggatccaatcttagtagacgtaaatgttcatccaacaaaactagaagtgcgtttatcaaaagaagagcaactatatcaattgatagtgagcaaaatacaagaagcatttaaagaccgtatattaattcctaaaaataacttggattatgtgccgaaaaaaaataaagtgttacattcattcgaacaacaaaaaatcgaatttgaacaaagacaaaacacagagaataatcaagagaagacgttttcatctgaagaaagtaacagtaagccatttatggtagaaaatcaaaacgatgaaatagttataagagaagattcatataatccattcgtaacgaaaacgtctgaaagtttaatagctgatgatgaatcttccggttataataatacacgtgaaaaagatgaagactacttcaaaaagcaacaagaaattctacaagaaatggatcaaacatttgattcgaatgacgatacatctgtgcaaaattatgagaataaagcgtctgatgattattatgatgtaaacgatattaaaggaacaaaaagtaaagaccctaaacgaagaattccatatatggaaattgttggccaagtacatggaacgtatattattgctcaaaatgaatttggcatgtacatgattgaccagcatgcagctcaagaaagaataaaatatgaatattttcgagataaaataggtgaagttaccaatgaagtacaagatttattaatcccgttaacatttcatttttcaaaagatgaacaattagtcattgatcaatataaaaatgagcttcaacaagtaggtatcatgttagaacattttggtggtcatgattatattgtaagtagctatccagtttggttccctaaagatgaagtagaagaaattattaaagatatgattgagctaattttggaagagaaaaaagtagatatcaaaaaattacgtgaagatgtagcaatcatgatgtcatgtaaaaaatctattaaagcgaatcattatttacaaaaacatgaaatgtctgatttaattgatcaattaagagaagcggaagatccatttacatgtccacatggtcgtccaattatcattaatttttcaaaatacgaattagaaaaattatttaagcgtgtgatgtagagaggatgaatcaagtgaataacaacatattgcctgccataagaaacattaaagatttagagaaactgattaaaacagattataaaatgtgtgtgcttctagatatgcatataggacatataaaaagtattatggaattgctgaagcaaaatcatatagagtgttttattcatatagatttgataaaaggtttaagccacgatgaatttgcaagtgaatttattattcagcaatacaagccaaaaggtatcgtatcgactaaatctaaagtaataaaaaaagctaaatcattaaatactttaacgatttttagagtatttattattgatagtcaagcattgaaacgcagtatagatttgataaaaaaagttgaacctgattttgttgaagtacttccaggtgttgcgagtaaagcgattcatcatattcagaaagaaacaaacacacaagtcattgcaggtggcctaattaatacaatagatgaagtcaatgaagctgttaaaaatggagcgaaatatgtaacaactagttatgataaactttggtaaatcataagtctgcaaaaatttcatttttcacgagatttagtcatataacatattaaaaaagccgttttcatatgggatatgtaataaggtatttaaggtatcatacaaagaataattaaataacataattagcacctctaaaacgattaaaatcattaaagttttagaggtgtttattagtaaaaaatgcaactagtcataaaaaatatggctgaagaatgtcaattaaacataatggcgtcataaataaattagtgcggattgatatttctagttttcaaattaaactacttttataaagacttgaaaaattaaatttgacaaaatttttacaaaaaccattgacaacgctttcatatcgatagtatcataacaaatataataaaagttaatacatagaatagagacgggagatttctacgagccaaactgctagtgtaggaatctctttgtctttttgggaggacatttaatatgaatgtatatttagcagaattcctaggaactgcaatcttaatcctttttggtggtggcgtttgtgccaatgtcaatttaaagagaagtgctgcgaatggtgctgattggattgtcatcacagctggatggggattagcggttacaatgggtgtgtttgctgtcggtcaattctcaggtgcacatttaaacccagcggtgtctttagctcttgcattagacggaagttttgattggtcattagttcctggttatattgttgctcaaatgttaggtgcaattgtcggagcaacaattgtatggttaatgtacttgccacattggaaagcgacagaagaagctggcgcgaaattaggtgttttctctacagcaccggctattaagaattactttgccaactttttaagtgagattatcggaacaatggcattaactttaggtattttatttatcggtgtaaacaaaattgccgatggtttaaatcctttaattgtcggagcattaattgttgcaatcggattaagtttaggcggtgctactggttatgcaatcaacccagcacgtgatttaggtccgagaattgcacatgcgattttaccaatagctggtaaaggtggttcaaattggtcatatgcaatcgttcctatcttaggaccaattgccggtggtttattaggtgcagtggtatacgctgtattttataaacatacatttaatattggttgtgcaattgcaattgttgtagttattattactttgattttaggttacattttaaataaatcatcaaaaaaaggtgatatcgaatcaatttactaaaataaaaagaaacgtaaatagcataatttaacatgtttgattcatggattatgctattttttcgccaaaatttaacagattttgtacaatgggttagcgattattttttaataaaggagatactactaatggaaaaatatattttatctatagaccaaggaacaacaagctcaagagcgattttattcaatcaaaaaggggaaattgcaggggtagcacaacgtgagtttaagcaatattttccacaatcaggttgggttgaacatgatgcaaatgaaatttggacatctgtgttagctgtaatgacggaagtaattaatgaaaatgatgttagagctgatcaaattgcaggtatcggtattacaaaccaacgcgaaacaacggtggtttgggacaaacatactggccgcccaatttatcacgcaattgtttggcaatcacgtcaaacacaatcaatttgttcagaattaaaacaacaaggatatgaacaaacatttagagataagacaggattacttttagatccgtattttgcaggtacaaaagttaaatggattctagacaatgttgaaggtgcacgagaaaaagcagaaaatggcgatctattatttggaacgattgatacttggttagtatggaaattatcaggaaaagctgcgcatattactgattattcaaatgcgagtcgtacattaatgtttaatatccatgatttagaatgggacgatgagttattagaactacttacagtacctaaaaatatgttgccagaagttaaaccttcaagtgaagtatatggtaagacaattgattaccacttctatggtcaagaagtaccaatcgctggtgtagctggtgatcaacaagcagcattatttggacaagcttgcttcgaacgtggtgacgtgaaaaacacatatggaactggtggcttcatgttaatgaatacaggtgacaaagcggttaaatctgaaagtggtttattaacaacaattgcttatggtattgatggaaaagtaaattatgcgcttgaaggttccatctttgtttcgggttcagcaatccaatggttacgtgatggattaagaatgattaattcagcaccacaatcagaaagttatgcgacacgagttgactctactgagggtgtttatgttgttccagcttttgtaggtttaggaacaccatattgggattctgaagcacgtggtgcgattttcggtttatcacgtggaactgaaaaagagcactttatccgtgcaactatagaatcactatgttaccaaactcgtgacgttatggaagcaatgtcaaaagactctggcattgatgtccaaagtttacgtgtcgatggtggtgcagttaaaaacaactttattatgcagttccaagcagacattgttaatacttctgttgaaagacctgaaattcaagaaactacagctttaggtgctgcatttttagcaggattagcagttggattctgggagagtaaagatgatatcgctaaaaactggaaattagaagaaaaattcgatccgaaaatggatgaaggcgaaagagaaaaattatatagaggttggaaaaaagctgttgaagcaacacaagtttttaaaacagaataaacttgtagattagacttttgtataaacattgtgatacaatcaatttaagttaatatttgaatcgagaagcgagagatttgttcgaacatgtacaattgaaggattgtttatgtgggacaagtctctcgtttttacattttttaggaggcgttttggaatggcgttgtctacttttaagagagaacatattaaaaagaatttaagaaatgatgaatatgatttagtaattattggtggcggtattacaggtgcaggtattgcactagacgcgagtgaaagaggaatgaaagttgcattagttgaaatgcaagactttgcacaaggaacaagctcaagatctacaaaattagtccatggtggtttacgttacttaaaacaattccaaattggagtagttgccgaaactggtaaagaacgtgcgattgtttatgaaaatggacctcatgttacgactccagagtggatgcttttaccaatgcataaaggtggaacatttggtaaattctcaacatcaattggtttaggaatgtatgatcgtttagcaggtgttaagaagtctgaacgtaaaaaaatgttatctaaaaaagaaactttagctaaagaaccattagttaaaaaagaaggtctaaaaggcggcggttactatgttgaatatcgtactgacgatgcgcgtttaactattgaagttatgaagcgtgctgctgaaaaaggcgcagaaattatcaactatactaaatctgaacacttcacttatgataaaaatcaacaagtaaatggtgttaaagttatagataaattaactaatgaaaattatacaattaaggctaaaaaagtggttaatgcagcaggtccatgggttgatgatgttagaagtggtgattatgcacgcaataataaaaaattacgtttaactaaaggtgtacatgttgttattgatcaatcaaaattcccattaggtcaagcagtatactttgatactgaaaaagatggaagaatgatttttgcaattccacgtgaaggaaaagcgtatgtaggtactacagatacattctatgacaatatcaaatcttcaccattaactacacaagaagacagagactatttaatcgatgcgattaattacatgttccctagtgttaatgttacagatgaagatattgaatcaacatgggcaggaattagaccattaatttacgaagaaggcaaagacccttctgaaatctctcgtaaggatgaaatttgggaaggtaaatcaggtttattaactattgcaggtggtaaattaacaggctatcgtcacatggctcaagacattgttgatttagtatctaaacgcttgaaaaaagactacggtttaacatttagtccatgtaatacaaaaggtctggcaatttcaggtggcgatgtaggtggtagcaagaactttgatgcgtttgtagagcaaaaagtagatgtagctaaaggattcggcattgatgaagatgttgcaagacgtttagcatctaaatatggttcaaatgttgatgaattgttcaacattgcgcaaacatctcaataccatgatagcaagttaccattagaaatttatgtagaacttgtttatagtattcaacaagaaatggtatacaaacctaacgatttcttagttcgtcgttctggtaaaatgtatttcaatattaaagatgtattagattataaagatgctgtcatcgatattatggcagatatgcttgattactctccagctcaaattgaagcatatactgaagaagttgagcaagcaattaaagaagcgcaacatggaaataatcaaccagcagttaaagaataattaatttgtacaatcataaactggtgtcctgttttaagggcatcagtttttttatacgagatacattagtcaattgaaactatgcatcactaaatgtatgataataataaaagcgaatataaaagcgttgttattaaaggtgtgagatgatgactgaaaaacaatttaaattaactgtacaagataatacgaatattgaagttaaagtgaattttacagatgtagattcaaaaggaattattcatatatttcatggtatggctgaacatatggaacgttacgataaattagcacatgcactttcaaagcatggcttcgatgtgatacgtcataatcatcgaggacatggtattaatattgatgaatcaacaagagggcattacgatgatatgaaacgagttatcggtgatgcctttgaagtagcgcaaacagtgagaggcaatgttgataaaccatacattataatcggacattcaatgggatccgttatagctagattgtttgtagaaacatatccgcaatatgttgatggtctaattttaagtggtactggtatgtattcattatggaaaggtttaccaaccgttaaagtgttacaactgattacaaaaatttatggtgctgagaaacgagttgaatgggttaaccagttagtatcaaatagttttaataaaaaaatacgtccattacgtacacaaagtgattggatttctagtaatccaattgaagtagataactttattaaagatccatatagtggatttaatgtgtcaaatcaattattatatcaaacagcctattatatgctacatacatcacaattaaaaaatatgaaaatgttaaatcatgccatgcctatattattagtttcaggatatgacgatcctttaggtgattatggtaaagggattttaaaattggcgaatatatatagaaaagctggcattaaaaatgttaaagtgaatctttatcatcataaacgtcatgaagtgttatttgaaaaagatcatgacaaaatttgggaagacttgtttaaatggttgaatcaattttataaaaaataaagaaagtggaattaaatatgaataaaaataagccttttattgtagtaattgtggggccaactgcttcaggtaaaacagagcttagcatagaactcgcgaagcgtatcaatggtgaaatcataagcggtgattctatgcaagtttacaaacatatgaatattggaactgcaaaagtaacacctgaagaaatggatggtattccacatcatttaattgatatcttgaatcctgatgatacattttcagcatatgaattcaagcgattagcagaagatttaattactgatataacgaatagaggtaaagttccaatcatagcaggtggaacaggcttatatattcaatcattaatatataattatgaattagaagatgaaacagttacacctgcacaattatccatagttaaacaaaagttatctgcattagaacatttagataatcagcaactacacgattatttagctcaatttgatgcggtttctgcagaaaatattcaccctaacaaccgccaaagagggttgcgcgctattgaatattatttaaaaacaaaaaaacttttgagtaatcgcaagaaagtgcaacaatttactgaaaattatgatacattattattagggattgaaatgtcgcgtaaaacattatattcaagaataaataaacgtgttgatattatgttggatcacggattatttagagaagtgcaacaacttgttgaacaaggctatgaatcttgccaaagtatgcaagctattggatataaagaattaatacctgtgattaacggacaaatgatttatgaagatgctgtcaatgatttaaagcaacattcacgccaatatgcaaaacgacaaatgacatggttcaagaataaaatgagtgttcattggttagataaagaaaatatgtcacttcaaatgatgttagatgagattacaacccagattaagtaaaaggagtccgacagatgattgcaaacgaaaacatccaagacaaagcactagagaattttaaagcaaaccaaactgaagtaactgtattctttctaaacggtttccaaatgaaaggtgttattgaagaatacgacaagtatgtcgtaagcttaaattctcaaggcaaacaacacttgatttacaaacatgcgatcagcacttatacagtagaaactgaaggtcaagcatctactgaaagtgaagaataagttgtaatcatatgggcacgatttaatgactcgtgtacataacgtttgaagtatgataaatagatatagaaataaagtcatatgtgacatcaattaaatgatgttcaaatgacaagatacaatagaggaatgtttgtaataaaaacgcttcatataaaggtcgagtcaatatatgatacgactttatatgaagcgttttatttgctatgagctagtatattttataataatttttctatttctctttcgatttgaacaggttttttttgaggtgcaaatcgtttaacaacgttaccttcgcgatccactaaaaacttagtgaaattccatttgattttctcattaaagaatccgtgttgtgccgcagtcaaatatctaaataaaggtaattgatgttccccttttacgtctattttttgatgcatagggaaggtaacaccatagtttaatttacagttttgagctgcttcttcgcctgatccaggttcttggccaccaaattgattacaagggaaacctagaattacaaacccttgatctttgtatttctcgtataatgattgcaaaccttcaaattgtgaagtaaagccacattcgctagctgtattaacaattagcataacgtcacccttatatgcatctaatttgtaagtaacacctttatttgtttctactacaaaatcataaattgtctccattgaatcatcctttcgatttacttaaaatgtaccataaaatcgtgtaatagtctttactaaaactctatgatagaatactttgagtaggattttattaaggagatgtataacatggctcagcaacaaattcatgatactaaaaataaactagaaaaagctgtcttagtcggtgtacatgctcaagatgataagcaatttaattttgagtctacaatggaggaattatcatctttatcagagacttgccaacttgaagtgttgggtcaaattactcaaaacagagatcgtgtagatcgcaaatattatgttggtaaaggtaaaatggaagaaattcaagcatttattgagttcaaagatattgatgtagtcatcacgaatgatgaattaacgactgcacaatccaaatcactaaatgaagctttaggtgtaaaaattattgatagaactcagttgattcttgaaatatttgcattaagagcaagaagtaaagaaggtaaattgcaagtagagctagcacaacttgattatttattacctagattgcaaggccatggtaaaagtctttctcgtttaggtggcggtattggaactagaggccctggtgaaacgaagttagagatggatcgcagacatattcgaactcgtatgaatgaaattaaacatcaattgcggacggtagaagaacatcgcgaaagatatcgaaataaaagaaatcaaaatcaggtgtttcaagtagctttagttggttatacaaatgctggtaaatcatcatggtttaatgttttagcaaatgaagagacatatgaaaaagatcaattatttgcaacgttagatcctaaaacacgacaaattcaaataaatgatggatttaatttaattatttcagatactgttggttttatacagaaactacctacgacgttaattgcagcttttaaatcaactttagaagaggctaaaggtgcagatttattagtacatgtcgtagatagtagccatcctgaataccgtacgcagtatgacacagttaatgatttaatcaaacaattagatatgagtcatatttctcaaatagttatttttaataaaaaggacttatgtgatcatgcatcaaattgtccagcaagtgatttgcctaatgtttttgtttcttctaaaaatgatggtgataaattacttgttaagacgttatttattgatgaaatcaaaaggcaattaacttattatgatgagacaattgcgacgaataatgcagatcgattatattttctaaaacaacatacattagtgactgaacttaaatatgatgaaattgaaaatgtttatcgtataaaaggatttaaaaaataataaaaggacgaaattcaaatgaaagatataagtaagatagtagctgacgtcgaatcaacgttagcaccatattttaaagaaattgaagaaacagcatatattaatcaagaaaaagtattaaatgcatttcatcatgtcaaagcaaccgaaagtgatctacaaggatcaacaggatacggatatgatgattttggacgtgatcatttagaagaaatatatgcgcaggcatttaaagcagaagatgcaattgttcgtccgcaaattatttcaggtacgcatgcgattactattgcattacaaagtttattaaaacatggtgatgaattaatttatataacgggaagtccatatgacactttacttgaagtcattggtgtaaacggaaatggtattgaaagtttaatggagcacggtgtatcgtataaagatattgcacttaaagaaggtaagatcgatattgaaagtgtgttagatggggtttctgagcgtaccaaagtaatagcgattcaacgttcgaaaggctatgatcaaagaccttcaattcctctagatgaaattgaacaggtgattactaggttgaaagaagtgcatcctaatattttaatatttgtggataactgttatggggaatttgttgaaagacgtgaacctatagaatgtggtgccgatttaatagcaggatcattaattaaaaaccctggcggtggtttagctaagattggtggatacattgctggtagaaaagatttaattgaacgatgtggttatagattgacagcacctggtattggtaaagaagcaggtgcatcattaaatgcattgcttgaaatgtatcaaggtttctttttagcaccacatgttgtcagtcagagtcttaaaggggcattgtttactagtttatttttagaaaaaatgaatatgaacacaacgccgaagtactacgaaaaacgaactgatttaattcaaacagttaaatttaaaacgaaagaacaaatgatttcattttgtcaaagtattcaacacgcatccccaattaatgcacattttagtccagaaccgagttatatgcctggttacgaagatgatgttattatggctgctggtacgtttattcaaggttcatcgattgaattatctgcagatggacctattcgtcctccttatgaagcatatgttcaaggaggattaacatatgaacacgttaaaattgctgtgacaagagctgttaatcagttgaaagaacaaggacttatataatagattaaatttcaccctaaatgataatgtgttttgggtgaaatttttttgcggagatttatcagattatttttaaaaattgaaaaaatattttagctgtagattgttttatggcgttttaaaggtcaaaattgcagttatatcaatgttttgagctttatgtcagaaaacctgacatatttttgaaatcctaaaaaaattatgataagttattaacaagttcaaaagtagaggagaggaacaatgatatcgaatgatgcaatcagacgaaatatggctgtcttctctatgagtgtagtaagtaagttaacggatttaacgccaaggcaaatacgttactatgaaacacatgaactcatcaaacctgaaagaacagaaggtcaaaaacgtctgttctcactcaatgatttggaaagattactagaaattaaatcattattagaaaaaggatttaatatcaaagggattaaacaaatcatttatgactcacaagagcatttaacaacagatgaacaagagataagaaaaaagatgattgtagatgccacgcaaaagcctattggagaaactttgccaataaatcgtggtgatttatcccgatttattaaataaaatttggaggattttaaaatgccaaaacgtactttcactaaagacgacattcgtaaatttgcagaagaggaaaatgtaagatatttaagattacaattcactgatattttaggaacaattaaaaatgttgaagtgcctgtaagccaattagaaaaagtacttgataacgaaatgatgtttgacggttcttctatcgaaggtttcgtacgtatcgaagaatcagatatgtacttacatccagatttagatacttgggtaatcttcccatggactgctggacaaggtaaagttgcacgtttaatttgtgatgtatataaaacagatggaacaccatttgaaggggatcctcgtgcaaacttaaaacgtgtattaaaagaaatggaagatttaggcttcacagactttaacctagggcctgaaccagaattcttcttgtttaagttggatgaaaaaggggaaccaactttagaacttaatgatgatggtggatatttcgatttagcacctacagatttaggtgaaaactgtcgtcgtgatattgttttagaattagaggatatgggcttcgatattgaagctagtcaccatgaagttgcccctggtcaacatgaaattgactttaaatatgcagatgctgttacagcatgtgataatatccaaacatttaaattggttgttaaaacaatcgcacgtaaacataatttacacgcaacatttatgcctaaaccattatttggtgtgaatggtagcggtatgcactttaacgtttcattattcaaaggtaaagaaaatgcattctttgatccgaatactgaaatgggcttaacagaaacagcttaccaattcacagctggtgtacttaaaaacgcacgtggatttacagcggtatgtaacccattagtaaactcatacaaacgtttagttcctggttatgaagcaccatgttatattgcatggagcggtaaaaaccgttcaccgttaatccgtgtaccatcttcaagaggattatcaactcgtattgaagtacgttcagttgacccagctgcgaacccatatatggcgttagctgcaattttagaagctggtttagacggtattaaaaataaattaaaagttccagaacctgttaaccaaaatatttacgaaatgaatcgtgaagaacgtgaagcagtaggcattcaagacttaccttcaacactttacacagcattaaaagcaatgcgtgaaaatgaagttataaaaaaagctttaggaaatcatatctataatcaatttattaattcaaaatcaattgaatgggattactacagaactcaagtatctgaatgggaaagagatcagtacatgaagcaatattaatacgctaaacaatgatgggaaatcagtaatatcaagggctagagcgttttgctttagctcttttttgatttaactgggcaacttttttgggtgtaaaatgtgccttttgttacgattgggcaacttttggtcaagttttggtcaagtaaatgttttgtgtatttatttttttaaagctggggaagaccattttatattttagttcacatgaattttaatatatttggaggtgatgagatgaggcgataaaagaacgtcgcgaaaacgttgagtattacttgaaaatagccatatcatattacttctcatcgaattcatttgcagaacgttctaaggtaagacgccgaaaagagggaccttactactcattattaagggggtaatactatatgaaaagagaaacaaaacaaaaaatatctttttgtttatcgatcggtattttcattttagttatactactattgatattctaaaaaattaaaaatttcgcctcatctaatttatgaattgctatgatgaaatattcaatacaatcaaaaaattgatagaaaacaaagagatatcaagttatcaaattaataaagatactgggataagttacggtaatattaatgctatgcgccgtggggaaagaagaatagaaaatttaagcttaaagaatgcaaagatcttatatgaatatgcgaaaaaggtattgtaatataagcattgagttcaataggcatacaataactgcccaaactagtgactgagtgggtgtttttatagtattaaaagttttctaaaagtgaaagaaatcatgtttagtgatttacttatgtttttttaaaatagtataataattttatataatatatagaacttcagtataccttttgagtatatatggagttctttcttttttacaagatgtatatgtataaatggaaatgtttattacattacataaaaacctttaggtgctcttagatggatgttaatcataaaaaaagagattttgaaaaatataggctattataatttagaattacaaattataaatcttgccagtggatatgggagttcaacatgtcacttaccccaatttgtggaatgttaaataactataaagaggaaaggagaaaaaatgataagaatggttaaagaaaaagaacgaatagcaaaattaaatttcgaatagctgtgacgagcttaataattcaagtactttattttatcaaatcgttcttttaaaaaggtaaagggcaaaagacctttaccacattaaatagggaggtggtatttatgacaagagaattaaggaaaaaattaactctctatcttaacattgcaactttaatattatttattattaatttaactagaaaaaaataaactattctttcaatttgacaaaaattatgaaccagtttaaagaaatttataatacaatagaaaaattactgaatgataaatcaatatctaattatagaattaatcaagacactggtgtttcttatggtggtataagtgaattaagaagcgggaaaagaaaagtgaataatttaactttagaaacagcggaaaaactctataattaccaaaaacaattagaaataatgatttaagattaaaataagaccatatcttttgaaatatcatggagtgagccttttaaatcatctaattttaaaatatattaaatatggatagcttaatgtgaatataaataaaaaattatcaaataatatagaatatatgaagacaagaaattttatcaatatataataaaaaacgccaatactattaggtattagtttatgaattaactagtttggcaactacaaagaaacaatgtattgctaaacgtagttactgcattaggattattataattataaatagaaagagagtgtgattaataatgaatgagattgaaactattataagtgaaatagaaaagttattaactaacaatacaccatatagtatttcaaaaaactcaggtgtaccacgtcaaacagttactgatttaaaggtaggtaaaactaaaataaaagaagctaaatttaaaacgataatcaagttatatgaatatcaaagaacattagaaaataaaacagaatgttaacaaaaatattttgttaggttaggtggacaagaaattaaatttctaatgatttcatggttgtctgtccacgttttgtccacctcaataagataatctcttagttttagaaattgtacatggttaaataatcaaaaatgcatattatgaaattatcattgccattaaatcttgaatgatctttaagcgatgatataaaaggctgaacacagtaaataagttaactttaatgcagtattctatactatacatattttgtaataatgtttatgcacataatttttcattgacaattttttatattaaattgtgtaattggcatatatgatgatttgtgataattatattgtaatatagcatttggttttatgattctaaaattaatagatttgaaaagtatactttatttcatgaaagtttttggtacatttatttgaaaatgtttttattacaaagttacatggctaaatgtttcttaacaaaattaatttttcgagtgtaaagaatcgtgtggtaaacataatttatatagattataaggaggtgaaaatggtcgaggaagttaaaacgataaaatagtttgaatgttttgatttcaattctggtaggactattgaatttgcaatctaataagaatgtgaggtttgatttaatatgaagtcatattctttgaataaaatattactttctcaccattagtaaaatgaagatgactattaaagtgcgaaaaacaaataaaaaagagaaaatagaatttttaatagggacgtttataattattttagtaatattagggttcaaaattatgaaataaatgtatagtatttgagaagtctatatgactccggaaaaattaaagtctaaagatatctcaatatctcaaatttaatagactactggaattagtagtttgaatattgaaagacactaatctaataaaaatacataaaaggttaaactttagaagtggttgtaaacttcaatgaatactaaacattgaagtttagtaaaaggcgtaaagtatacaagacaaatcgtttatctttgacaaagtaattgatgatgaaaagtcgttaatatgtagaaacaaaaattgaaaatataaaatttaactattatgaagtgttgatagccattaataaatagaaaaataataaaatcatttataaataaaaaatacgttgagttcacagaatttcgaaaaaaagcagaaaacatggtacagatatggagatgaaaaaatgtcagaatacaagaaaaaaataattgaattaattgaaagtaatttaacaggatatgaaatttctaaaaaactggagtttctcaatacgtactttcacaattaagacagggcaaacgcgaagtagataatctaaccctgaatacaacagaaaaattatatgaatatgccaataaagttttgtaatttaactaatgtataaattaatcaagctatgtttatttgatttaactattaataaaaatcatatggtgaatggatattataataattaaaatacaaaaatagtagattccaatttgtgaaaaaggagtatgtcgtttcatttagaatttattgcacgaaattagcatcgaataagggaaaataagtgttaagttttaaatgataaaaaagattggaatggatcgtcttgaaatgctcccttcaaagttttcattttttcaatgtctacttcgaaggggcatttccattatattgttatagctttttatatttgtataatgaacatataagtttaagaagatgagagtgaaggaaataaaaaagctcaaatgtaccaaattgttaatcttaataaatctctactttataaagattgaatggacattcgagcgttaatcagtcaggagggaatttcactcctacaatttaataataatacttgcttcaccactgtacaaggagtgatttgttatgttcaaagtgaattattcgattttaagttattatccagaatataatatcgcagtaagttggcaacgtttaagagaaggaaaaacaataaaaagcaagatttaatactgctgcgtcatgaggcgcttgaacattatttgatgaataagtataatttcaactatgattatgcacataaaattgtatcaaaaaaatacgattattcaatttttataaaaaagaaggtggattaaatgcttacattaataaaattgaaagaagatgaacaggttataatatatgaatatatacctgaagatgatataagtaacggtaaaggttcagtaacttttaataaaaaagatgcagaggttatagatttctcattatctgaaatagaaaatgaagaatattttatgttatatcgtaataagtctttttctgtagtaagagactttatcgagaagcaagaatttcccgaaaattataaaatagcatggtattaatgcatcctttctagacagataaagagaaagtggtgctatttttatatgcttttttaactatttactgaaatagcagaatcacaaaagttaacatatttaaaagaacttggtgaagatggcgaatataaatatgttgccaaaatagatagtaaaacgtctaaactatgtcattcgctcaacggcaaagtatttaaagttaaagatatgataccaggtgtgaatgcgccacctatgcatccttggtgtagaagtaccacagtgccacatgttggcaattggtgagacaagttctttaaagagcgtgaaggtaaatatcaagtagaagatgacacaaccaaagatgaattacaacaagctaaagtattaggaaagaaaatatatattactgatcaagcaattgataaagtcagatatgttgatattccaacacataccaaagaagaaaatcaatttatacaagaacaacataaagccttgcttaaagatgccaaagaaaacaatgatagcaatgaagtagcttatttattaaaagatggtaaagttacaaaagtatatggtgatcaagatagtgtatcttttgcaccaggggaaaaagcaacagaattgttatttaacagtaaaccgaattcaattgttatgttacataaccatcctgggcagtctagtttttctcttacagacttgtatttatttatatttaataattctattaaaacactgacaattgttacaaataaaggtcaaacaaagtacttaactaagacaaaagaatattgcaaatcaacttgtattgattgtattaaaaaatataataaaaataagaatataaaaaaattcaatcataaggatattgatatgattctaaagagattatataatagtggtaacataatatataaagttaggtgattaaaatgtattttgcacagttagatggtgaaataactaataaacagtcacaagaattattggataaagaatacaagaaagcaatagaattagaaaataagaataaagaacaaaaattagaaaaatagcatcctttctacacagataaagagaaagtggtgctatttttatacacttttttaaccttccaatgtgaaggttattttttattgtccaaaacgtgctgatgacattttaaaagcaagtatggaatatcagtcgacagactataaacggaggtatgtctcatggagaaaaatgaaagtaatattactgacgtaactcagaacgaagagcaactagacaacagtgatgaacaatcacaacagaatgagaaaacattttctcaagaagaagtatcacaattgattaaagagcgtatagctagagaacgcaaaaaatcagatgaacgtattaaagatgcggttcaagaagctgagaagttagctaaaatgaagtagcttatttattaaaaggtgctaaagttacaaaagtatatggcgatcaagatagtgtatcttttgtgccagggtaacaagcaaccgaattattatttaacagtaaaccgaattcaattgttatgttacataaccatcctggacaatcaggattttcattgaatggtttaaagatgtttattggaaataaatctatccaaacaacgactattgttactaactatagtgtagtaaaacatataagtaaaacttcattatataatcagtctcaagtttataaaattatgaaagatataaaacaatctataactatgagaaataatgaagcgatagttgataatattctaaagcaactttataataaaacatatataaaacgaaaggacaaataggagtaatacattatgtcaattcaacaattagatggttacatttctatagaagatttttttaagcatatggatgaattatcgaagaaagaagaattagaaaaagaaattaatcaatcaaagtctaaatatcaatagcatcctttctacacagataaagagaaggtggtgctatttttatacgcttttttaactatttactgaaaatgcagaatcacaaaagttaacatatttaaaagaacttggtgaagatggcgaatataaatatgttgccaaaatagatagtaaaacatctaaattatgtcattcacttaacggaaaaatatttaaagttaaagatatgataccaggtgtgaatgcgccacctatgcatccttagtgtagaagtaccacagtgccacatgttggcagttggcgagacaagttctttaaagagcgtgaaggtaaatatcaggtagaagtaaaagaagctaaattacaagaaaaagctaaaaaccagatgaaagaaatgattgaaagttgtaaaatgaaaatagaaataaattgtgaaaaacaaaatggacatatgttaggtcatcatctatataatgaaaataaaaaaagagccattttaaataataagaaattgcctagctatacaatactttctatagatttattgaatgaattgttaagagaaaaaatgtcaacaggcaatctaatattaagtgatgagctatttgatatgaaagagattattaattttaatcaaattattggaaaagtacatatcgataatgtgtatattgaaaccagaaaaggaaaagtgcattattcgaagacaggtgctcatatagtaccttatattgataagtaggtgaaaagtattgagaattgaagatgcatatcgtaaagatgttattatcacgcttttgaataatgaagaatacgaaggggttgtaactgactatgaaaatgaatttgagagtgaaacaggaaatcttgttgtagatatacagactgattttgctgtttattcgtttgatgaaactgagataaaaagtattagattattaaaataatttctaaatagcatcctttctacacagataaagataaagtgatgccattttttgcgcttttataacaactaaggatacaagacacataccttcaacaaaatcttcatctaaacctatcgatttcctaagttcaattttaaacacaaagtttatttgtaaagatgcacacctataaaaatcttaatcatcgaaatgtcacaaacatctccatattaaaaacttaaatagtgcattccatttaaactaaacatcgatattcctaccaaaatagatttagtaattcaaatgatattacatcactttcataaaataactacaaccatcataatacttttcaaatctcgtcaaattaaagtaaatacagcacaaattaacatttttaaatatataaaataaaacaagatactcaataatctgtagtatcttgttttggaatgatgtaattttataacatcaacggcttcaaatgagtagtttcatatataaatcaataaacacaactactcaactgaactggcttaattaataaatgatttgccagacgaaatataacagcattattagattaattctaatagtttatttaaattttcttcggttgtcgcccagctggttgcgaatctaacaacacgatgttgatcatcgtatttttcccaaacagcaaatttaactttttgttctaactctgctattttctcgttacttaaaataaaaaattgttgattggttggagaatcaaagtaaagacgatagcctttatttataaacccgtctttcatcttatttgccatttcgatagcatgtctgcttatattaaaatataaattatccgtaaataattctaaaaattgtatgcctgttaaccgtccttttgctaaaagtgcaccgtgatgtttgattcgagtggtaaattgtttcggttcattattcttcgtaaaaacaattgcttctccgcataatgcacctatcttcgtaccacctatataaaatacatcacaatatttagcgatgtctttaatagtcatatctgattgatcactcatcaatccataccctaatcgtgcaccatccataaataatggaagctgatattgcttacatactttgcataactcttccaattctgatttagagtataatgtgccatattctgtaggatgagaaatatataccattcctgggaataccatatggtcctttttaaaatcacttttaaatgtctccatgtaagtttcaacatctgaagcactaacttttccttccttagagggtatagtaattactttatgtccactatattcaattgcaccgccctcatgcacagcaacatgaccagtgtctgctgaaataaccccttcgtaactttctaacattgaattaataacaacctgattggtttgcgttccacctactaaaaaacggatagtagcatttggacaatcaattgtatctttaatcttttcaattgcctgagctgtgaattgatcaaagccatatcccgaagcttgtacaagatttgtatctactaatcgttttaatactttttcatgagcaccttctaaataatcattttcaaatgagatcactacatttccccctaaaactaatatcagcattttaataagataaactaatttcaaaactagttcgatatttaaaatgtattgtgaattgttaaagtttgtatcgcattatcgcgaagttgaataaatatattatacatcaaacaatacattaagaaaattaattaatttttaatcatagcgacttttcatgctggaacacatatattaatgattgaattttactgttaaaagttctatgatttaggaaatagagaaaagaggggatttaaatggaacaaattaaacttaaaacttttacagctgagactttagagttattagaaaaaaacattaatgcttttttaagttctgaagaagctacaaatttaaaattagtaaatattactattaaagaaatagaagaaagaacattcccaaataatgaagaagaattcaatgcaattttaactttatctgtgaataaataatatgatgtgaaaggtgcaaaatgttttttgtgcctttctttataggagaaaagactatgcgatatacattttcaaatgatttaggaacactttttaccattattttagccattggattcatcattaatttagtattggcttttattattatctttttagaaagaaatagacgtacagcgagttcaacttgggcatggctatttgtactttttgtcttaccattgattggttttattctttacttgttttttggtagaaccgtttcggcacgtaaattgaataaaaacaatggtaaggtgttaacggatttcgatggacttttaaaacaacaaatagaaagctttgataaaggtaattatggtactgataacaaacaagttcaaaaacatcatgatttagtacgtatgcttttgatggatcaagatggttttttaactgaaaataataaagttgatcatttcattgatggaaatgatttatatgatcaagttttacaagatattaaaaatgctaaagaatacatccatttagagtattatacattcgctctagatggcttgggccaaagaattttaaaagcgttagaagagaaattgaaacaaggtctagaagtgaaaattttatatgatgacgttggttcaaagaaagttaagatggctaattttgatcattttaaatcgttaggtggagaagttgaagcattttttgcttctaaattaccgttattgaatttcagaatgaataacagaaatcatagaaaaatcatcgtaatcgatggtcaactaggttatgtcggaggatttaacattggtgatgaatatctaggattaggtaaactagggtattggagagatacgcatttacgtatacaaggggatgcggttgatgcactgcagttgcgatttattttagactggaattcgcaagcgcaccgtccacagtttgaatatgatgttaagtatttccctaaaaagaacggaccattgggcaattcaccaattcaaatagctgcaagtggtccggctagtgactggcatcaaattgaatatggttatacaaaaatgattatgagcgctaagaagtcggtatatttgcaatcgccttatttcattccggataactcatatataaatgccattaaaattgcagctaaatcaggggtagatgttcatctaatgattccatgtaagccagatcatcctttagtttattgggcgacatattcaaatgcttcagatttactatctagtggcgtaaaaatttacacgtatgaaaatggatttatacattctaaaatgtgtttaatagatgatgaaatggtttcagtcggaactgctaatatggactttagaagttttgaattgaatttcgaagtcaatgcttttgtatatgatgaaaagcttgctaaagatttaagggtggcttatgaacatgatattacaaaatcaaaacaactaaccaaagaatcatatgccaatagaccgctgtctgttaagtttaaagaatcgttagctaaattagtttcgccaattttataatttatttgtaaggagtctcgattatagaggctctttttattttgcccaaaattaaaataacgataaatatattatgtgaacctaataatgacatttgtcatttcaaatctatgacaaagtgttctattttaaatctaataaatttactaatattaaattaaggaaaaaatagaggtgattaaattgattcaaatatctaatatcaacaagtcatttaataaaagatgtgttctaaaaaatatttcgttcgatattgaacaaggtaaatgtatcgctttaattggaaaaaatggtgctggaaagtcaacgttaattgatatattaattggtaatgttaatgctaattctggtgagatatttgataaagacaagttattacaaagtgaaaatcgcagtataatgttccaaaaaacgatgtttccagatcaattaaaagttattgagattatcaacttatatcaatcattttacgaaaatccattaccattggaagaaataatagaactgacgaaatttgattctagtcaactgaaccaatttgtaaataaactttctggtggtcaacaacgattactcgattttgtattatctttaatcggacaaccacaattgatcttattagatgaaccaacatcgactatggatatagaaattagagaatatttttggtcaattattgaaaatttaaaagaagataatcgaacgatactctatacatcgcactatattgaagaagtcgaacgtatgtcagacaaaattattctcattgaaaatggagaaataatacttaatgattcaacgtcacatattagaaccaatcagcaatctcagattacgttatccgatgaatatataagaaagttaaaactagataaagatgatttagttattcaaaaaaatcataatggcactatcaaaattattacttcaaatgtaaatgatacgattttatatcttcaacaacttcatattaatttggatgatattgaaatacaaaaagtctcaattgttgattcatacttcaacaataaaaagcaaaggggatctaattatgatactaagttacttgaaaatcgaatttaaagttataatgcgtaaaaaaacaacattaatattatctattttatttcctgttatattctatatattatttacttcgatattggaattgccggaagatgttaaacctaaattttataaagagtatatgtatagtatgacggtttatagtttgttaagttttagtttactaacttttccattagatattattaatgaaaaacaaaatgaatggcgccaaagattaatggtaacaccatttacttttactagttattatatttcaaaagtagtgaaaactatgctgcaatttgcaatagcgatattagttatttttatggttggacatttttataaaggtgttgcaatgagtgcagttcaatggttagagtcaggaatatttttatggttaggtgcgtctctattaataacttttggcatattattttctttgttaaatgatattcaaaaaacaagtgctttagctaatatcgtaacaattggtttagcagtattaggtggattgtggtttccgataaacacatttccaaattggcttcaacatgttgctcatgttttaccgagctatcatttgcgtaaactaggtgtagatattgcttcaaatcatcatatcaatttaatatcatttgctataatactcttgtatgctttagggagtatattagcagtatattgtattagtcattttaaaagggcggaataaaatatgaaatttttaaaagatacttcaattgctgaaatatcgtctatactttatctgatttttcctattgccggtatattttttaatgaagtatatggtcccaaatggttgtatattatatcagtcattgtcttttcgttgtcgtatcttatattagttatagtaaataatagacttaatacattaatgttttacattttgttgattattcattattttattatttgttattttgttttcagtgtacatccaatgctaagtttgtttttcttttatagtgcttttgccgttccatttacttttaaaaataatgttaaaaaaacggcaactaatcttttcatactaacaatgattatatgtacaataataacgtacttattgtataacaactattttgttgcaatgatggtttattatgtcgttatatcgttaataatgctagataattttaaaaaaatgaaaaaccgtgaatatcaaaaagaaatagcagaaaaaaatagacatattaatacattaattgctgaacaagagcgacatagaattggtcaagacttacatgatacgttagggcatgtgtttgcaagtttatcattaaaatcagaattagcttataaactaatagatgctgatgtagaaaaagtaaaagctgaattattagcaattaataaattatctcgtgaatcattgaacaaagttcgagaaattattgatgatgtaaaattaccatcatttattgaagagattgatagtatacgtaaagttttaaaagatgctgatattgattttacatttgaaaataaagaattagcgcaagtattaagtcctactaaacaatctatgttagttatgattacgcgtgaagcgataaataatgttattaaacatgcaaatgcttcaaaagttcatggtaaattaaaaactgtaaacaatcataaattactgcttatgattgaagatgatggcaaaggtatcgatagtgattgtgaggtgaaaagtatttcacagcgtgtacaacatttaaatggaactttagcagtcgactcaacaaatggaactaaaataatcattgaaatctcaacaggaggaatagcatgacatctttaattattgcagaagatcaaaatatgttacgacaggcaatggttcaattaattaaactacatggtgattttgaaattttagcagatactgataatggtctcgatgcaatgaaacttattgaagaatataatcctaacgttgttattttagatatagaaatgccaggcatgactggacttgaagttttagcggaaattagaaaaaagcatttgaatattaaagtgattattgtaacaacttttaaaagaccgggatactttgaaaaagcagttgtgaatgatgtggatgcatatgttttaaaagaacgttctatagaagaattggtggaaaccattaataaagtaaataacggagagaaagaatatagcgccacattgatgacttcattttttgtagataaaaacccattaacgcccaaagaacaaattgtattaagggaaattggcaatggtttaagtagtaaagaaataagtgaaaaattatttttgacagatggaacagttagaaattatacatctgttataattgataaattatttgcagataatcgttttgatgcttggaaaaaggcaaatgaaaaaggctggatctaaatacaaacaaaaaagtattgagtgttttgatttaagagacttggaaagtgagtcaataatcaaaatcttactcaatacttttattttggtactcgcaatttagatttgttaactaattttttcgcttattataaaacgaaacaatcaagtaaacgataaagcctacaaagatacccaataaaatagatagtactgccgtcactattaatggtaatttgaaaaatatttgtaggaaaataccaatgataattgcgataattactgcaattaatgtgactgtattttcatttgaaatgttcatttattttcactccttaacaataacattatatcatgctatagctttccaaaatattgaaatatgtagatatggctattgacgatatttcttaacttttatatgattaatcggaatgaaaaaagagaagtaggtggcaatatgaagtcaaataaatcgcttgctatgattgtggtagccatcattattgtaggtgtattagcatttcaatttatgaatcatacgggtcctttcaaaaaggggacgaatcatgaaactgtacaagatttaaatggtaaagataaagtacatgttcaaagagttgtggatggtgatacatttattgcaaatcaaaatggtaaagaaattaaagttaggcttataggggttgatacgccagaaacggtgaaaccgaatacgcctgtacaaccatttggcaaagaagcatcaaattatagtaagaagacattaacaaatcaagatgtttatttagaatatgataaagaaaaacaagatcgctatggtagaacattggcgtatgtatggataagtaaagatcgtatgtacaataaggaattagtggaaaagggacttgctagagagaagtatttttcaccaaatggcaaatatagaaatgtatttatagaagcacaaaataaagctaaacaacagaaattaaatatttggagtaaataattaaataggtgattatatatattaaagtaaaatatacttgaagcatcgatttattattaccataaatttatatatagaaataatttaaaggcataataaccatagtgcgtatcgagcgtaatggattattatgcctttgattttacttgaatatagctgtgatttgatcaacctgttctttatttaaagggtgtttagatagctctatggcttcgctaataatacgtcgtaacgaagattttgttgaaactgtatcaacatatttatctctttcttcagaaccttgaatgatattaactgtaccatcactaaagtaaataacaccggtactttggactttaaagttaaagttttgttcaatatgatcctttaatgctttcgcattatttgctgctaattgatacggatcataatcataaaaatcataaataacacgatttggttgaactgtttctgtaaaagtatagatagactttcttgatgaattaaactgatcatgatattgctggctaatgtaatgaccgacaactttttcaatattactattgcttatttctgtatcatgctcatcaggtacatcaaagtgataaaatgttttttcaccccagctttttacatcaacgtttattaaaccgatatctgaaacaatgataaaatcaaatgaacgtgcatactcgaaaaacggatgtttagtagctaaattgcttgtaacgataatatcgtaatattttaatttaccattttcgagatagctatctaaaatcttgcgtaattctcttttagcatttttgtatgcatggtggccaacatcattattagaactcagcatttgacttcttaattcagcattttctgcacttaatgctttgttctttttaataagttgctttcttgcataaacttcggtatctattttactattactatacctttgatttaaaactaatataccaattaatgctacaatgataatgataagtacaacataaaaagacattttttcaccaatcctttttgacttctttaactttgtatacaataataattaataaagattaattgttattcaatttcccacatttttattagttgattttagttcatcattgttataatcaaattataaactgacagatattgatgttcaatgaatatgacgtgaaagattcgtgaattcaagtttatgtcgaatttatgttataacggtcatttaaatgacagaattaggtcactcatagtattttgaagattgaattcattaattttaaaatgtataatgatatttgtgaaagcgcttgcttaggaggtgtatttgagagtgaatgaaatgaatgctaaagaacaattagtggacaatttaatgaaaacatcatcgcaattatttaaatttcacggtgaagttgccatgcagcttttcttaaatgatgaattaaaattaccttctattgttgaaatatgcgtggaacgtaagcgtttaagtgatattgtgaaagttattccgcaatcatatgcgttactatacatagataagcaagatcaagcaatagctaaagaagatttatcactttcaaaaattgcaaaagtttatgtgcaatatgatgatacaacaataatgagtattttcgtttatgatgtagtaaacgatgaatggatttttagattggatccgaatatacgtatacctaagagtaacatatacttccatagtttaaattgggatgtggattatattaaaccggagattgttctaatgtatgatctaatgcaacaccatcagtatcatcattattccaattataaacgagtcatagatgcattaagctactatcaattttttattttaaaatttgtagtaggtgagcaacgtattaaggatgcaatccagagaacaataaataattaagaaaaagcaattcataacgcagttgaatacatgtgttacgaattgcttttatattagtttttatcacacaagttttttaatgcaaccccgtgatagcaaaactcatatgtagataatacagctttttcagcatcatctacatgaattccaaacatcatcgagatttccgaagcaccttggttaatcatttttaagttaatttttgattcagctaaggcatgtgtaattttatttgcagtaccgatgactttattcataccttcgccgacaatcattaatattgctaaatcatgctcaatacttagctcatcaacatcacatttttgacgaatttcatttaatacttttgtttctttattttgaatttgttttgaacgcataacgatactgatagtatcaatacctgaaggcatatgatcaaatgaaatattattatcctctaagacacctaatatctttctagtaaacccgacttgtctattcattaaatactttttgatattaataacggtaaaatctttatcacaacttataccgctaatcacatttttcgcatttatttctctatcatgcactataaatgtacctttatcttgagggcggttcgtatttttaatcaccacagggatgcgatctttataaagtggttgtaaggcttcatcatggaaaacactaaaaccagcataagataattcacgcatttctcgataagtgatttcttcgattaattcaggatctttgatgatatttggattagctttataaataccagacacatcggtgaaattttcataaattgtagctctaacaccacttgatatgatggcgccagttatatctgatccgccacgtggaaatgtaactatatatccttcatgagatacgccgaaaaatcctgggataattagtttctcatcataatctcttaattttttaatttcagagtaagcactatctaatatttgtgcttcttgtgggacgtcagtaacaaaaatacccgcttccttcggtgatatatattttgttggtataccttgactattattatataaagctatcaattgcgcattaaaatcttcaccacaagaaagtaatgcatctaatagtctctttggttcattttttaattgattaatataatgttccaaagtcacatctatcgtccgtaaaatactttcatccatttgcaattcttttacaatatcatcataacgctgaataatttctctttttttatcatgataatcaagatgattaatgaccttttcatataatctgattaacaaatcagttgttttaatatcattatcatgtcttttacctggagcagaaacgataacaatctttcgctctggatcagaattaacaatatttaaaacctttttaatttgagtagcattggagacggagctaccaccgaatttggaaactttcatagtgcatgccaacctttctaaaaaatcagaaaattgtattcagttttgtaagtaagaatgatattatgtatttatattttgaatattacgaactttacaaaaataaagaataattctatactatactatcatctagtgtttttcaataatacatttgtttttctcaaaagcacaaacggaggtacataaaatgaaaaaattaaatatagcattattaggattaggtactgtcggatctggtgttgttaaaatcatcgaagagaaccgacagcaaattcaagatacattaaataaagatattgtcataaagcatattcttgttcgagataaatctaaaaagagaccgctaaatattagccaatatcatttaactgaagatgttaatgaaattttaaatgatgattcattagatattatcgttgaagtcatgggaggaattgaaccaactgtagattggttaagaacagcacttaaaaataaaaaacatgttattaccgcaaataaagatttattagcagtacatcttaaacttttagaagatttagcagaagaaaatggtgtagctttaaagtttgaagcgagtgtagcaggtggtattccgatcgtaaatgccataaataatggtttgaatgcgaataatatttcaaaatttatgggaattttaaatggtacctctaattttattttatctaaaatgactaaagagcaaacgacatttgaggaagcacttgatgaagcgaaaagacttggttttgctgaagcggatccaactgatgatgtagaaggggtagatgcagcgcgtaaagttgtcattacatcatatttatcatttaaccaagtcattaaattaaacgacgttaaacgaagaggaattagtggcgtaactttaactgatattaatgtagccgatcaactggggtataaaattaaattgattggtaagggaatatatgaaaatggcaaagttaatgcatcggtagaaccaacgttaattgataaaaagcatcaattagcagctgtagaggatgaatataacgcgatttatgtcattggtgatgccgttggtgacacgatgttttatggaaaaggagcaggcagtttagcaacaggtagtgccgttgtcagtgatttattgaatgtagcattattctttgaatcagatttacacacattgccaccacattttgaaataaagacagataaaacacgggaaatgatggattcagatgcagaaattaatattaaagaaaaatccaatttctttgtagtagtgaatcatgtcaaaggttcaattgaaaattttgaaaatgagttaaaggcaatattaccatttcaccgatcattaagagttgcaaattacgataatcaatcatatgccgctgttatagttggattggaatcatcaccggaagaattaatcactaagcatggatacgaagttgacaaagtatacccagtagaaggagtttaattataatgagaagatggcaaggattagtagaagagtttaaagcacatttaccagtaaatgaaaatacaccaaaattaacattgaacgagggaaatacaccactcattcattgtgaaaatatgtctaaaatactaggtatagatttatatgtgaagtatgaaggtgccaatccgacaggttcatttaaagatcgcggtatggtaatggctgtgacaaaagcaaaagagcaaggtaagaaaattgtaatatgcgcttcgactggaaatacatcagcgtctgcagcagcatatgcagcgagagcaggtttaaaagctatcgtcgtaataccagaaggtaaaattgcattaggtaaattgtcgcaagcagtaatgtatggtgcagaaatcgtttctattgaaggaaactttgatgaagctttagaaattgtaaaagaaattgcaaaaagtggcgaaatagagcttgtaaactctgtcaatccatttagaatcgaagggcaaaagacaggctcatttgaaattgtacaacaattagacggtgaagcacctgatattttagcgattcctgtaggtaatgcaggtaatattactgcatattggaaaggctttaaagaatatcatgaagctaaaggttcacaattgccgaaaatgtttggcttccaagctgaaggcgcatcaccaattgttcaaaataaagtcattaaaaatcctgaaacgattgcaactgctattcgaattggtaatcctgctagttgggataaggcgactaatgctcttaaagaatcaaatggattaatagatagtgttactgatgatgaaattctagaagcatatcagttaatgacaactaaagaaggtgtctttagtgaaccagcgagtaatgcttctattgcaggtttaattaaattgcatagacaaggtaaattacctcaaggtaaaaaagtagttgctattttaactggtaatggattaaaagatcctgatactgctatttcactactagataatccgataaagccattgccaaatgataaagatagcattatcgattatattaaaggagctttataacatgtcgaatgttttggagttaacaattcctgcatcaacagccaaccttggagttggctttgattctataggtatggctttagataaatttttgcatctgtctgtaaaggaaacatcagggacaaaatgggaatatattttccatgatgatgcatctaagcaattgcctactgacgaaacaaactttatttatcatgtagcacaacaagttgcttctaaatatagtgttgacttgcctaatttatgtatcgaaatgagaagtgatattccattggcaagagggttaggttcgtcagcttctgctttagtaggagctatatatatcgcaaattattttggtgatatccaactgtctaaacatgaggtattacaattagcgactgaaatcgaaggacatcctgataatgttgcgccgaccatttatggtggtttaatcgctggatattataatgatgtctcgaaagaaacgtcagttgcacatatcgacataccagacgtggatgtgattgtaacgataccaacttatgaactaaaaacagaagcatcaagacgtgctttaccacaaaaattaacacatagtgaagcggttaaaagtagtgcaattagtaatacaatgatttgtgcattagcacagcacaattatgaattagcaggtaaactcatgcaacaagatggctttcatgaaccgtatcgtcagcatttaattgctgaatttgatgaagtgaaaacaattgctattcaacataatgcctatgcaactgtaattagtggtgctggaccaactattttaatatttagtcgtaaagaaaatagtggggaattggttcgctctttaaatagtcaggtagtatcatgccattctgaattggtcgatattaatatcagtggtgttaaagaacgaattgtataccaatagacgctttatattgtaaaatagtattaaatgcagaatagagaggagatttaatgcgatatgacaaattataaagttgtcgttttagatatggatgacacattgctaaattcagataatgtgatatcagaagaaactgcaaattatttaacagcaattcaagatgaaggttattatgttgttttagcatctggtagacctactgaaggtatgattccaactgctagagatttaaaattacctgaacatcatagctatattattagttataacggtagtaaaacgattaacatgactaatgaagaagtagaagtaagtaaatcgattggtaagcaagatttcgatgaaattgtagattattgtcgagatagaggctttttcgttcttacatatcatgatggtcaaattatttacgacagcgaacatgagtatatgaatattgaagcagaattaacaggtttaccgatgaaacgtgttgatgatatcaaagcgtatattcaaggcgatgtacccaaggtcatgggtgtagattatgtagcgaatattacagaagctagaattgatttgaatggtgtgttcaatgataatgtagatgctacgacaagtaagccattcttcttagaatttatggccaaagacgtttcaaaaggtaatgcaattaaagcgttatgtcacaaattgggatattcggtggatcaagtcattgcttttggtgatagtatgaatgataaatcaatgtttgaagtcgcaggtctagctattgctatggggaatgcatcagatgaacttaagcaatatgcaaatgaagttacgttggatcataatgaaaatggtattccacatgcgctcaaaaaattgttataaattttaaaataagccttaacacatgatatttgaataagatatcttgtggttaaggctttttatttttgtgaaaatgacttcagttatactatggaggatttgaaatacatattttagattagtaatgatatcaaacgaatagagtaaatgtatattttttgaataaatcaagtattaactagtcactgaaggtagataaataaatttgatcattctgaataataacgaatgcattaaaaaatgcagtgacaatctaacattaattgttaaaatcactgcaagcatcttgattttatttagctgtttgtgtccagtcatgcttacctctgaaacgttttacatgagcatatatttggtcagcagtataatctaaatttgtataaactgtaatactgaacgctgattggttttcagcaaatgattcttcggaaaataattcctttaagtgcataaataaatcattcatttgtttatggtttaaaccgggatattcccttaaagttctctttaataattgtccgttcttttcttctaatgcttgaactacaataacaaatctttcatcttgctttagtacatcatcaaataaatttgtttgtccaatcattgaatttcacccctgaaaagttattgttatctatattatacacgatatgcaaaatatctaaaataaagaatggtaacatggtaataataaaatataaacagaatactagttaatacactttatactagaaaaagatattaaagtatatctgctttacaccattaaaaagcggcaaatgctatagataatctaaagcatctgccgtatgagaatttatttatttttgattgtcataatcgtgtggttttaaattaattgtttctagctttacaaattttgttttgtgaatgattttatgaataaagtaaatcaacgctagaatgattaaaggtaaaaagtttttaaaagcatttaaccattgatcttttaaaatatattcaactgagccaccaaatagcaagaataatagtgtagtgatgacaatgattggtcctaatggataaaaaggtgctttatatggtaggaccttattagggtcttgaccttgttttttaatagcttgtcgcaatcgtatttgtgaccaaatgcttgatccccaaacaactataatcattgaaccaataatttcaagtaaattaaaaacggcatttgaattaaagtttgcataaataataacaataacaacgactgcataagtagttaataatgctcttaaaggtaacttagttgtcttgtttaatttacttaaaaattggggtgcttttttgtctgaacttaaggaatacaacattctgcctgttgtataaacacctgaatttgcagcggataataatgaagttaaaataaccgcgttgattactgatgctgcaaaggctatgcctactctatcgaatacaattgtaaatgggctttgacttattgaactacttgctcttaataatgatggatctgtgtacggaataattgcaccaattactgcaattgataagacatagaataaaagaatacgccaaaatacttgtttaattgccttaggcatagactttttagggtcatctgattcaccagcagttactgctactacttctgtaccaccaaccgaaaatccggcgactaataatacgcctaagaaaccagagataccaccaacaaacggtgcttggccttttgtatagttttcaaatccatatgtatgaccacctaagataccgaaaatcattaaaaagccaaaaataacgaatacgataattgttaacactttaatcaatgataaccaaaactcagtttctccaaatgattttacagaaaaaatgtttaataatagtaaaattgtaataaagattaagctccaagtaatggggtggaaaaatttaaatgtgtcccagaaataaagcacatttgacgctactatgacatcaacacttgtaactaatgaccacaatgcccaatacaaccatcccatggtaaagccaagagatgagtcaataaagcgtgttgaataagagctgaatgaacctgatactggataaaatgttgccaactctccaattgatgacattaagaaatatagcatgacaccaataacaagataagcgagtatagcgcctccaggaccagcttgagaaatgatattaccagtagctacaaatagaccagtcccaattgcaccacctatagcaatcatggaaatgtgtcttgagttaagactacggttcattttattatcttccatatttagtctcccatctatttaaatatacccattattgtaagctttttaagtgtactattcaataactatttagtactgtaaagcgaaaaaattaaaattttctgattttttaatcatcttgagcatgtttaattgtaattttgatggggttaaattataatatgtattaaattataattattataaattgtggagggatgactatgtcacaacaagacaaaaagttaactggtgtttttgggcatccagtatcagaccgagaaaatagtatgacagcagggcctaggggacctcttttaatgcaagatatttactttttagagcaaatgtctcaatttgatagagaagtaataccagaacgtcgaatgcatgccaaaggttctggtgcatttgggacatttactgtaactaaagatataacaaaatatacgaatgctaaaatattctctgaaataggtaagcaaaccgaaatgtttgcccgtttctctactgtagcaggagaacgtggtgctgctgatgcggagcgtgacattcgaggatttgcgttaaagttctacactgaagaagggaactgggatttagtagggaataacacaccagtattcttctttagagatccaaagttatttgttagtttaaatcgtgcggtgaaacgagatcctagaacaaatatgagagatgcacaaaataactgggatttctggacgggtcttccagaagcattgcaccaagtaacgatcttaatgtcagatagagggattcctaaagatttacgtcatatgcatgggttcggttctcacacatactctatgtataatgattctggtgaacgtgtttgggttaaattccattttagaacgcaacaaggtattgaaaacttaactgatgaagaagctgctgaaattatagctacagatcgtgattcatctcaacgcgatttattcgaagccattgaaaaaggtgattatccaaaatggacaatgtatattcaagtaatgactgaggaacaagctaaaaaccataaagataatccatttgatttaacaaaagtatggtatcacgatgagtatcctctaattgaagttggagagtttgaattaaatagaaatccagataattactttatggatgttgaacaagctgcgtttgcaccaactaatattattccaggattagatttttctccagacaaaatgctgcaagggcgtttattctcatatggcgatgcgcaaagatatcgattaggagttaatcattggcagattcctgtaaaccaacctaaaggtgttggtattgaaaatatttgtccttttagtagagatggtcaaatgcgcgtagttgacaataatcaaggtggaggaacacattattatccaaataaccatggtaaatttgattctcaacctgaatataaaaagccaccattcccaactgatggatatggctatgaatataatcaacgtcaagatgatgataattattttgaacaaccaggtaaattgtttagattacaatcagaggacgctaaagaaagaatttttacaaatacagcaaatgcaatggaaggcgtaacggatgatgttaaacgacgtcatattcgtcattgttacaaagctgacccagaatatggtaaaggtgttgcaaaagcattaggtattgatataaattctattgatcttgaaactgaaaatgatgaaacatacgaaaactttgaaaaataaatttgatatgtagtttctatattgcgtagttgagcagtttatgatatcataataaatcgtaaagattcctaacaagagagggtgtttaacgtgcgcgtaaacgtaacattagcatgcacagaatgtggcgatcgtaactatatcactactaaaaataaacgtaataatcctgagcgtattgaaatgaaaaaatattgcccaagattaaacaaatatacgttacatcgtgaaactaagtaattcttatcattcaaatacgacgatttgaaaataaagcgggcttacctattatattggggagctcgcttttttatgaaatttttgtgaagagtgattaatggattgagtttcatcggtagaacaatatatgattgtattagttgttactttattaaaatttgagaatatttatagaaggaaatagattactgattttataaagtcactttgttagcgaatgcttgaaagagtatttaatatagtagaatttaaaatttcaaagcggaatttaataagtacgaagtaattctgggtatgttttataaatgttcgataatacactttaatcttaaatatgatggtttagaaaatgatttaacaaagaaatgaaactttactgttgaattatgtgaggattgtgttattatataaatcgtaataattacgatttgataaaaagtgaggtaactatatatggctaagaaatctaaaatagcaaaagagagaaaaagagaagagttagtaaataaatattacgaattacgtaaagagttaaaagcaaaaggtgattacgaagcgttaagaaaattaccaagagattcatcacctacacgtttaactagaagatgtaaagtaactggaagacctagaggtgtattacgtaaatttgaaatgtctcgtattgcgtttagagaacatgcgcacaaaggacaaattccaggtgttaaaaaatcaagttggtaaaatcaaatttcgtactttagcccatttacaatatcaataaaacaatgtacagtatatacgaatgctataaactgaatgttttctcatattaataaggaaacattcggtttttaatttgcatttaaaaataattagtttttaaaggggctatttaaagtgaaaatatttgattacgaagatattcaattaatacctaataaatgcatagttgaaagtaggtctgaatgtgatacaactatccaatttggtccgaaaaaattcaagctacctgtagttcctgcaaatatgcaaacagttatgaatgagaaattagcgaaatggtttgctgaaaatgattacttttatatcatgcatcgttttgatgaagaagcaagaataccttttataaaacatatgcaaaattcaggcttatttgcatctatttcagttggtgtaaagaaagcggaatttgattttattgaaaagttagctcaagaaaaattaatccccgaatatattacaatagatattgcgcatggtcactcagattcagtgataaacatgattaaacatataaaaaaccatatacctgatagttttgttattgctggtaatgttggcacgccagaaggtgttagagaattagaaaatgctggtgctgatgctaccaaagtcggtataggtcctggtagagtttgtattacaaagattaaaacaggttttggtactggtggttggcagttagcggcattaaacatatgtagtaaagcagctcgtaaacctttgattgccgatggtggtataagaacgcatggcgacattgctaaatcaattagatttggtgcatcaatggtcatgattggttcattatttgctgcacacgaagaatcacctggtgaaactgtagaacttgatggtaaacagtataaagaatattttggtagtgcatctgaatttcaaaaaggcgaacataaaaatgtagaaggtaaaaaaatgtttgtagaacataagggttcattaatggataccttaaaagaaatgcaacaagatttacaaagctcaatttcatatgccggtggaaaagacttgaaatcattacgtactgtagattatgttattgttagaaactctattttcaacggtgatagagattaatatttatagtaggtgatgtaaattaaaaaattcatagtaactgttgttgcgtttttatcaattactatcattgcgccaataacagaatttaaaccattcattcatttacaaaatgaagtaagacaatatattgacattcacatcaataaagaaacaatttctgcggaaaataaattggatacaccgaagaaacaacaatttgcctttaataatatacaaatgaacatgtcgaaatcagatgttgagaaaacattaaataaaccaaaaagagtgacatttaatgaatatggtacgaagtggtatacgtattatgatgacgattacaataattttataatgataagttacatgaaagataaagttaatgcgttatatacaaatcaaaatataatcacttcaaaatcaaaaattaaatacaatacacctaaatcggttgtaaggcaaagattaggcgaaccagaaacagagattgttaaaggtagagtgcgttacgaacaaaataataaagaatatgatgttttccataaaaatcacatttatacgacggtattttatgataagcatcgacgtaataatgtaacagctgttttacaagtaagtgatgctatggaaaatagattaaaagaacaatatggagcaccttcgaaatcgcttgcagatagttttgaactacaaaattttgatttagttaatgctgcaagaaaacaacatcaattatttacattgaagtattctaaacagaattctgaaactgcacgtaagcatagtaaagatatggccaacaatcattattttgatcatacaaatttaaaaggtcaatcaccatttgatcgattgaaaaaagatggtattacatttaactcagccggagagaatttagcatatggtcaagttagtagtatctatgcacatcaaggattaatgaattctattggtcacagaaaaaatattttaaatgatacgtttaaaatattaggtgttggtgttgattttaatgatgaaaaacaacctttttggacagaaaattatactggttaatgtttttggcatgagattaaagggtaatgtttgtctgtaaggaagtagataaacatgatgacaacagataaaccaaaagatgcggatatacttgaacgcgtcaaagatatacttaataaaaaagaaagaaaaaaataataatggctcgctcctgtaaattattacgggggcgagttttaatttgtgtaacattttgcagaaatctgtaattcaaaatttatattaaagaatgagattatctaacaattcgcaatttctgtttgaactgaatttagattagaataaataaaacctcttgaaaacgtaactttttcaagaggtccaaaatttataaaaatgagggcttaacaattacgataatatataacggtttaaaatattacatttcgcggtacaaaccaattactttcccaattacagcaacattgtctaggtaaattggctccattgtactattttcaggttgtaatcgataacgatttttttctttatagaagcgtttgacagttgcttcatcttcctcagtcatagcaacaataatgtctccattttctgctatggtttgactgcgaacaattactttgtctccgtctaatataccagcctcaatcatactgtcgcctacgacgtttaatatgaatatgtcgctattgtgtgtcgatgttaagtgttcaggtaatggaaaatattcttcaatattttctactgcggtaataggaacacctgctgtgactttaccaataactggcacatgaatcgtttcttccatattaatattatcatttgtttgatcacttacaatttctatagcacgtggtttcgttggatctcttcttatatagcctttttcttcaagacgtgaaaggtgaccatgaacagttgaactggatgctaagccaactgcttcaccaatttcgcgaacactaggcggataacctttcgtttgaacaacttgtttaatatagttatatatttcgctttgtcgttttgttaattctctcatatataggcactccctaaattaatttaaatacagtatatcattaatttgaaaccaaaacaaacatttgttcgttaaaatattgacacagaacataagttctgataaattactaatacaaacaaatgttctaggagtgaaaatgatgttttacaataaatataaaaacgtatcaacatatatcatcatatttttagtttcaagtgcagcctttgcaatattcttgttaagtgcgaacattagtgctcactcggaacaagtgtacgaaatgactgaccatcaaattaagaacaatacgataaataaagcatacgaacataaagaccctacaaacaatagcgaacaaagagatgggaaagtgttcgctttaataaattgatacattgtcacaacgttattttgcctatttttgcgaaatagcgttttttattacttttttgctgatcttaaatttgttatattttgttaaagtattataatgattgaataaacaaattgaaggtaggttttttaattgagtaattctgatttgaatatcgaaagaattaacgagttagctaaaaagaaaaaagaagtaggattaactcaagaagaagcaaaggagcaaacagccttaagaaaagcttatcttgagagttttagaaaagggtttaaacaacaaattgaaaatactaaagtaattgatccagaaggtaatgatgtaacacctgaaaaaattaaagagatacaacaaaaaagagataataaaaattaaatcacaaatctgtaaagaattttctgacattataacttgaaataagtattttacttatctttttattttaaaataagttataatgtatttgataaaattgaagaagggaagatacacaagatgtttaatgaaaaagatcaattagctgttgatacgctacgtgcactaagtatcgacacaatcgaaaaagcgaattctggtcatccaggattacctatgggagctgccccaatggcttacactttgtggacacgtcatctgaattttaatccacaatctaaagattacttcaatagagaccgtttcgtattatctgcagggcatggttcagcattattgtatagcttgttacatgtttctggtagtttagaattagaagaattaaagcaatttagacaatggggttctaaaacaccaggtcatcctgaatacagacatacagatggtgtagaagttactaccggaccacttggacaaggttttgctatgtcagtaggattagctttagcagaagatcacctagcagggaaatttaataaagaaggatataatgttgtagatcattacacatatgtattagcttctgacggtgatttaatggaaggtatatcgcatgaagcagcttcatttgctggacataataaattaagtaaattagttgttttatacgattcaaatgatatttcattagatggcgaattaaacaaagctttttctgaaaacacaaaagctcgttttgaagcatatggttggaattacttactagttaaagatggtaatgatttagaagaaattgataaagcgattactacagctaaatctcaagaaggaccaacgattattgaagttaaaacaacaatcggatttggttcaccgaataaagcaggaactaatggtgttcatggggcacctttaggtgaagttgaaagaaaattaacattcgaaaattacggtttagatcctgaaaaacgttttaatgtttcagaagaggtatacgaaattttccaaaatactatgttaaaacgtgctaatgaagatgaatctcaatggaattcattattagaaaaatatgcagaaacatatcctgaattagcagaagaatttaaattagcgattagtggtaaattgcctaaaaattataaggatgaattaccacgttttgaactgggtcataatggtgcatctcgtgctgattctggtactgttattcaagcaatcagtaaaactgtcccttcattctttggtggatcagcagaccttgctggttcaaacaaatccaatgtaaatgatgcaacagattatagttctgaaacacctgaaggtaaaaatgtgtggtttggtgtacgtgaatttgctatgggtgctgctgtaaatggtatggctgcacatggaggtttacatccatatggtgcaacattcttcgtatttagtgattatttaaaaccagcgttacgtttatcatcaattatgggattaaatgcaacgttcatcttcacacatgattcaattgcagtaggtgaagatggtcctactcatgaaccaattgaacaattagctggattaagagctattccaaatatgaatgttatccgtcctgctgatggtaatgaaacaagagtagcatgggaagttgccttagaatctgaatctacacctacttcattagtattgacacgtcaaaacttaccggttttagatgtaccagaagatgtagttgaagaaggcgttcgaaaaggtgcctatacagtttatggctctgaagagacaccagaattcctattattagcttcaggttcagaagttagtcttgcagttgaagctgctaaagatcttgaaaaacaaggtaaatcagtgcgtgttgtttcaatgcctaactggaatgcatttgaacaacaatctgaagaatataaagaatcagttattccatcaagcgtaacaaaacgtgttgcgattgaaatggcttcaccgcttggatggcataaatatgtaggtactgcaggtaaagttattgctattgacggctttggcgcaagtgcacctggcgatttagtagttgaaaaatatggatttactaaagaaaatatcttaaaccaagttatgagcttataagaataatttataaagcgagtatgtttagaagtctaggatgcataatcttaggcttcttttaaagtgttgaaatttagagtatagcacttaaactacatcataagtgataagttatgaaagtatactatttcagattaatctttaaaagctctgttataacagcatgatttttgatattatttttagtatcgatattaaaatacttgaataaactagttcttgaaataatgtgatgaatttagtaaaattcagtaggataaagaaagcgggtgaaacaatggcaacttggttagcaattatttttatagtagctgcattaattttaggtttaattggaggtttccttttagctagaaaatatatgatggactacttgaagaaaaacccaccaatcaacgaagaaatgcttcgtatgatgatgatgcaaatgggtcaaaaaccttctcagaagaaaattaatcaaatgatgacgatgatgaataaaaatatggatcaaaatatgaagagtgcgaaaaagtaaattcgcaattgatagaggctattttccagatatggaaatggcctctttttataatcaaattaataagaataaatatgtttattaaaattaaagttaacaaaatgacgaatagactgagaaatgctataattcattttgtatgatttacagagagtttatttaacgagaaggtgtctgcgtgctctatttaatattttcaatcattgtagctttatttatgggaactatagttatagttattcgtatgaaagctcaaaattatccggtaaatgagaaaaaaatagttttgccaccgttttttatggcgaccggtgcattgatgtacgtcgttccatattttaggctaacaggatcggaaatgctagaagcctttataattggtttgcttttttctacagttctaatttggacttctcgatttgaagtcaaaggtacagaaatttatatgaaacgatctaaagcatttccagttattttgatttcattacttatcattcgtactgtgatgaaaatattcattagtaatgaaatagatcctggagaattaggcggcatgttctttttattagcattctgtatgattgttccttggagagcagcaatgctatataaatacaaaaaactaaagaaaacattaatcaattaattacttttaaaaccacttgtgatcgacttctaaatcagtcaatgagtggttttaattttacttgaaaaggtgaaatgattatattaaaataaaagcgaacaaatgttctatatggaggcagtaatgaaaattatacatacagcagactggcacttagggaaaatattaaatggcaaacagcttttagaagatcaagcgtatattttagatatgttcgtagaaaaaatgaaagaagaagaacctgatatcattgtgatagctggagatttatatgacacaacatatccaagtaaagatgcaatcatgttattagaacaagcgattggaaagttaaatttagaactgcgtataccaataattattattagtggaaatcacgatggtaaagagaggttaaactatggggcgagttggtttgaacataatcagttatttataagaacagattttacatcgattaattcaccaatagagataaatggggttaatttttatacactcccttatgctactgtgagcgaaatgaaacactactttgaagatgacaccattgaaacacatcaacagggaattacgcgctgtattgaaacaatagcaccggaaattgatgaagatgccgtcaatattttaattagtcatctgactgttcaaggtggaaagacatctgattctgaaagaccattaactattggaacggttgaatcagttcagaaaggtgtttttgatatatttgattatgtcatgctaggtcacttgcatcatccatttagtatagaagacgacaaaattaaatatagtggctccttattgcagtattcattttcggaagcgggtcaagctaaagggtatagacgtgtaacaattaatgatggcattattaacgatgtatttattcctcttaagccacttagacaattggaaattatctcaggcgaatataatgatgttattaatgaaaaagttcatgtgaaaaataaagataattatttacattttaaacttaaaaatatgtctcatattactgatccaatgatgagtttaaaacaaatttatcctaatactttagcgctgacgaatgaaacttttaattacaatgaagaaaataatgctatagaaataagtgaaaaagatgacatgtcaattatcgaaatgttttataaacatataactgataaagaattatcggatatccaatctaaaaagataaaaaatattttagaaaacgaattgagaaaggaggattaatgaatgaaaccattacatttaaagttgaataatttcggcccctttttaaaagaagaaattgatttttctaaaattgataataatgaattgtttttaataagtggtaagactggatcgggtaaaacaatgatttttgatgcaatgacttatgccttgtttggtaaagcatcaactgaacaaagagaagaaaatgatttgagaagtcatttcgctgatggtaaacagccgatgtcagtaacatttgaatttcaattaaatcatcgaatttataaagtgcatagacaaggcccttatatcaaagaaggtaatacaacaaaaacgaacgctaaatttgatgtatttgagatggtggatggcaagtatgaaattagagaaagtaaagtaatttcaggtacccaattcattattgaattattaggagtaaatgcagatcaattccgacaattgtttattttgcctcaaggtgaattcaaacgctttttaatatcaaacagtcgtgaaaagcaagggatattaagaacactgtttgacagtgaaaaatttgaagctatacgagaaatattaaaagaagaagtaaaaaaagaaaaagctcaaatcgagaatagatatcaacaaattgaccttttatggcaagaaattgaatcatttgatgatgacaatataaaaggcttattaggggttgccactcaacagatagacaaattgattgaaaatataccacttttacaagctaggtcgaaagaaatactagcatctgtaaatgaaagtaaagaaactgctattaaagaatttgaaataatagaaaagaaaacattagaaaataatatattaaaagataatattaatcaactcaacaaaaataaaattgatttcgttcaattgaaagaacaacaacctgaaatagagggaattgaagctaagttaaagttgttacaagatattacaaacctattgaattatattgaaaatagagaaaaaattgaaactaaaattgctaatagcaaaaaagatatttctaaaaccaataataaaatattgaatcttgattgtgataagcgaaacatagacaaagagaaaaaaatgttagaagaaaatggagatttaattgaaagtaaaatctcttttattgataaaactagagtattatttaacgatattaataagtatcaacaaagttatctcaatattgaacgcttgagaactgagggtgaacaattaggtgatgaattaaatgatctaattaaaggtttagaaacggtcgaagattcaataggtaataacgaaagtgattacgagaaaattatcgaactaaataatacgataacgaacataaataatgaaattaatataattaaagaaaatgaaaaagctaaagctgaattagataaactattaggtagtaagcaagagttagagaatcaaattaatgaagaaacatctatattgaagaatctcgaaataaaattagatcgctacgataaaacaaaattggacttaaatgataaagaaagctttataagtgaaattaaatctgctgtaaatattggagatcaatgtccgatatgtggtaatgaaattcaggatttagggcatcatattgattttgacagtattgctaaacgtcaaaatgaaattaaagaaattgaagcaaatatccacgctataaaatcgaatattgctgtgcataattctgaaattaaatttgttaatgaaaaaatatcgaatattaatattaaaacgcaaagtgatttttcacttgaagtattgaataagcgtctgctagaaaatgaaaatgcattgaataatcaaagagatcttaataaatttatagaacaaatgaaagaagaaaaagataatctaacgttgcaaattcataataaacaattgcgtctaaataaaaatgaatctgagttgaaattatgtcgagatctcatcactgaatttgaaacactctcgaaatataataatatcactaattttgaggtggattataagaagtatgttcaagatgtgaatcagcatcaagaactctcaaaggagattgaagataagttaatgcaattgtctcaaagaaagttaattgagcaaaataatctaaatcattatgaaaatcaactagaaacttacaataatgacttagaattgaatgaacagtctattgaaatggaaatgtcgaggctgaatttaactgatgacaatgatatagatgaaataatagcctggaggggcgagcaagaggaattagagcagaaaagggatacttataaaaaacgttatcatgaatttgaaatggaaatagctaggttagaatcattaactaaggataaagagttattggactctgataaattaaaagatgaatatgagctaaaaaaaggaaagatgaatacactgatagatgaatactctgctgttcattatcaatgtcaaaataatattaataaaacacaatctatagtttcgcatattaattacttaaatcaagaattaaaggatcaacaagaaatatttcaattggctgaaattgtcggtggtaagaataacaaaaatcttacattggaaaactttgtcttaatttactatttagatcaaattattgctcaagcaaatctgagattagcaacaatgtcagataatcgataccaactaattaggcgagaagcggtttctcatggtcttagtggcctagaaattgatgtatttgatttgcattcaaataagtctagacatattagctcgttatcaggtggagaaactttccaatcgtcgcttgcattagctttagggttaagcgaaattgtacagcagcaatcaggaggtatttcactagaatcaatatttattgatgaaggattcggtacattagatcaagaaacgcttgaaacagcgttagacactttattaaatcttaaatcaactggtagaatggttgggattatttcacatgtgagcgaattgaaaaatagaatacctttagttttagaagtgaaatcagatcaatatcagagttcaacaagattcaaaagaaattaaaacataaaaaatagagatggtactttggaatgtatagaacaaccttagcccatctctttttatttaaaaattattttttctcacgtaataaatctctgatttcagttaataacacaacattttcttccacaactgcttcttcttcggcttcttctttcttcattaatgtatttgcaatcttaacaaagatgaataaagcaaacgcgatgataataaagtcgataacagattggataaataaaccgtatttaataccccagaatgaccattctttagcaaaatcaactgatccgaaaattttaccaattaatggcataatgatattttctactaatgaagatataatcttgttgaaagctgcacccatcacaacagcaattgctaaatctaagacgttaccttttaaggcgaactctttgaattcttttaacattacactcaacctctcttttttaaatgtaacctcaattatacaacaaataaaaaaattagaaaatagattattcaagaaaatttgattatcgcaaagacctttgttatcctataaaggtgcgtgagttattgaataaaatgtttagataatatttttattctactacataaaattaaatatagaattgaagggagtaattaattatgaattcttcttcaccagagaatccaaatggaaagaagtattcaccagtcttcatctatagtgcaattgttgttgctatagtcgtattacttggtgcatttttacctgaacaattcaactatgttaccaataatattaaaatgtggattacagaaaagttaggttggtattatcttattcttactacgattatcgtgttcttctgtatattccttatttttagtcctattggaaaacttaaactaggtaaaccaaatgacaaacctgagtttaatacaatttcatggtttgctatgttgtttagtgctggtatggggataggtttggtgttttatggtgcagctgaaccgatggcgcactttgctacgccacctacagcagatcccaaaactactgaagcttatactgaagctctacgttcaacatttttccattggggattccatgcttgggctgtttatggtgttgttgcgttagcgttggcatattcgcaattccgtaaaggtgaaccaggtttattatctagaactttacgtcctcttttaggtgataaagtagaaggtcctattgggatttttattgacgttttatctgtatttgcgacaatcgttggggtagccgtttcgttaggtatgggtgctctacaaattaatggtggtttacattacttgttcaatgttccaaacaatacgtttgtacaagcgattatcatcattgttgttactatcttatttatagcaagtgcatggtctggattaagtaaaggtattcaatacttaagtaacttgaacattggtttaggtactattttaatggtagctgctttaattgttggaccaactgttcttattttaaatatgttaactagctctacgggtagtttactaaacacattcttgtttaatagttttgatacagcagctttaaatcctcaaaaacgtgaatggatgtcttcatggacactttattactggggttggtggttaagttggagtccattcgttggagtgtttattgcacgagtttcaaaaggacgttcaattagagagttcatttctggtgtcttgctagttccagcaattgttagttttgtttggtttagtgtctttggtgtattaggcatcgagacaggtaagaaacacaaagaaatttttgatatgactcctgaaacacagctatttggagtgtttaatcatgtgccatttggcattgttttatcgttgattgcattattattaattgcatcattctttattacatctgctgactcagcaacatttgtattaggaatgcaaacaacatttggttcattaaatccatctagtatggtaaaagttgtttggggaatttcacaggccttaatagcatttgtacttttattagctggtggcggtaacggcgctgaagctttaaatgcgattcaaagtgctgcaattataagtgcattcccattctcctttgtcgtcatactcatgatggtaagtttctacaaggatgcgaaccaggaacgtaaattcctaggtttaacattgactccgaataaacatcgcttacaagaatatatcaagagtcaacaagaagattatgaatctgacattcttgaaaagcgtcagtcacgtagaaatatagagaaaaaagataactaataaagtttagttaagtattttaataacaagtagtatgtcattctagtagctagaacagatatactacttgtttgtttttgtggaaaattgagtatattcaaaaggataagaacgagaatttcgttattaaactacgaattctcgatttttttatattttaagataggtttatttctgaaaacttaatagaaaggggtttgacaaagctaaagtgaagtttgacggtataaacgcaaattaaatatacttttatagaaaattaactcaggctgggacataaatcaatattctatgctctacgaagttatattggcagtagttgactgaacgaaaatgcgcttgtaacaagcttttttcaattctagtcaggggccccaacacagagaatttcgaaaagaaattctacaggcaatgcgagttggggtgagggccccaacacagaagctgacgaaaagtcagcttacaataatgtgcaagttggggatgggccccaacaaagagaaattggattcccaatttctacagacaatgcaagttggggtgggacgacgaaataaattttgcgaaaatatcatttctgtcccactcccatcaaaagaatgacattgaaaaaaatattaaagtttggtgccataattttctttctgctcaatgaaataatacgtttaaaaattgaattgaatcattcgcgaaattgataattattctcaattaataaaaaatacttattacaccttacctgtatgataagttttgcttatatactctgattaaaaagtcaaaacctaaattaagcgttttctaagcatgatgagttgtttatcaataaatataataatacaatttaatcaaggcatataaatataaaaatgtatcaagggggatcattaaatggctgcaaattttaaagagcaatcaaaaaaacattttgacttgaatggccaaagttatacttactatgatttaaaagctgtagaagagcaaggtattactaaagtttccaatttaccttattcaattcgtgttttgttagaatctttacttcgtcaagaagatgattttgtaattacagacgatcatattaaagctttaagtcagtttggaaaagatggaaatgaaggcgaggtaccatttaaaccttctcgtgttattttacaagatttcacaggtgtaccagccgtagttgatttagcttctttacgtaaagcaatggatgacgttgggggagatattactaaaattaatccagaagtaccggtggatttagttattgaccactcagttcaagtggatagctatgcaaatccagaagctcttgaacgtaatatgaaattagaatttgaacgtaactatgaacgttatcagtttttaaattgggcaacgaaagcatttgataattacaatgcagttcctcctgcaactggaatagttcaccaagttaacttagaatatttagcaagtgttgtacatgttcgtgatgtagatggtgaaaaaactgcatttccagatacattagttggtactgattcacatacaacaatgataaatggtattggcgtactaggatggggtgttggtggtattgaagctgaagctggaatgcttggacaaccttcttatttcccaattccagaggttattggtgtacgactagtaaattcattaccacaaggcgcaacagcaactgatttagcgttaagagtaactcaagagctacgtaaaaaaggtgttgttggtaaatttgtggagttctttggtccaggtgtacaacatttaccactagcagaccgtgctacaattgcaaacatggcaccagagtatggagcaacttgcggattcttcccagttgatgatgaatctcttaaatatatgaagttaactggtagatcagacgaacatatcgcgctagtaaaagaatatttgaaacaaaaccatatgttctttgatgttgagaaagaagatcctaattatacagatgttatcgaattggatttatcaacagttgaagcatcgctttcaggaccaaaacgtcctcaagatttaattttcttaagtgatatgaaatcatcatttgaaaattctgtaacagctccagcaggcaaccaaggacacggtttagataaaagtgaatttgataagaaagctgaaattaactttaaagatggatcaaaagctacaatgaaaacaggtgatattgcaatagcagcaattacatcatgtacaaatacatctaacccttatgtaatgttaggtgcaggtttagttgctaaaaaagcagttgaaaaaggcttgaaagttcctgaatacgttaaaacttctctagcaccaggatcaaaagttgttaccggatatttaagagatgctggcttacaaccttatttagatgatttaggcttcaacttggttggttatggatgtacaacttgtatcggtaattcaggtcctttattaccagaaattgaaaaagcgattgctgatgaggacctattagtgacatctgtattatctggtaaccgtaactttgaaggtcgtatccatcctcttgttaaagccaattacctagcttcaccacagttagttgttgcttatgcattagctggaacggttgatattgatttacagaatgaacctattggtaaaggtaatgacggtgaagatgtatatttgaaagatatttggccatcaattaaagaagtttcagataccgttgatagtgttgtaacacctgaattatttattgaagaatataataacgtatacaataacaacgaattatggaatgagattgatgtaactgatcaacctctatatgactttgatcctaattcaacatacattcaaaatccatcattcttccaaggattatctaaagaaccgggtacgattgttccattaaatggtttacgtgttatgggtaaattcggtgattctgtgacaactgaccacatctctccagcaggtgcaattggtaaagatacgccagctggtaaatatttacaagatcatcaagtgcctattcgtgaatttaattcatatggttcaagacgtggtaatcacgaagtaatggttcgaggtacgtttgctaatatacgtattaaaaaccaattagcgccaggtactgaaggtggttttacaacttattggccaacaaatgaagtaatgcctatctttgatgctgcaatgaaatataaagaagatggtacaggtttagttgtattagctggtaacgattatggtatgggttcatctcgtgactgggcagcaaaaggtacaaacttattaggtgttaaaacagttattgcacaaagttatgaacgtatccatcgttcaaatttagttatgatgggtgtattaccattagagtttaaaaaaggtgaatcagctgattctcttggtctagatggtacagaagaaatttctgttaatattgatgaaaatgttcaaccacatgactacgtcaaagttactgctaagaagcaagatggtgatttggtagaatttgacgctatggttcgttttgactcacttgttgaaatggattactatcgtcacggtggaattttacaaatggttttaagaaataaattagcgcaataaaaaatagatatcacagtaaaattttaatcggtatttgaggcactttgatagtgctcaaaaatacttctataaactttatgatataataggtcggttcaaaacctttgtgttcttggccggcctcttcttgtattttatgttagaatgagatataaagttaaactgaaagaaggcttaaaatgatatatagtattacagaaatagaagcgcgttatgctgaaactgataagatgggtgtaatttatcacgggaattatgcaacttggtttgaagttgcgcggttggattatatatcgaagttaggttttagttatgctgatatggaaaaacaaggaatcatttcacctgtgactgacctcaatgtcaattataaaaagtctattttttatccagaaaaagttaaagttaaaacttgggttgaaaaatattcgagattacgttcagtgtataaatatgagatttttaatgaaaaaggtgaacttgcaactacaggttccacagaattgatttgcattaaagaagatacttttaagcctatacggttggatcgttatttcccagattggcatgaagcttatagtaaagtgcaaacgctcaataatgaagggaaaacagtagagataatggatgatattgattctttataagttactgtaaatgtttggagaggcaatattaacaattaatctataaaaaatagccaatacgttaacattaatgtaattagcgtgaagataagctaatatatagcaaaaacgaacttgttcatacaacatcagatgtgctaaaccaaagtacaacttccgaggttcaggacacatcagaatgtgtaaacaagttcgttttattttagttattttgtggaataagaaatttcatcttcgtgatcaactacatttacaataatgtggtcatcttcaaagtaccacaaatctttttccgctacgacaacatttaaatcgtcatattgttgttcatagccaatatcaacatcttcctttggttcaactgtaaaagcaggactaaatccttgcttgagttggaattcgccaccatatcttacaaaaaacacgagcactttattattttcaggcaactcaagttcatttttaaaccaagttactgctgcatcagtaagttctatttgcataacaatgacctcctatatttattacagaatgggagtgggccaacttgtattatttgtggaatttcttatcgaaattctctgtgttggagcccaccccaacctgctcattattgtaagctgaatttccataagcttctatgttgggacccccgaccagaattgaaaaaacctagttataagcgcattttgttcggttaactacagctaatataacattgtggagcctatgacattgatttatgtctcggtctcaaatgttcttgtaaaaaactaagtatagttgaattttaagttaaaaaaattgtttttgcaaaaataaaataatccatcaactgcaaaaaaatatgcaatgatggactaatgtcaaaaaattgttacatccattttattttaggttcttcgcctctaaaaatccttgcgatattagagcgatgtctaattatcaatatgattgaaactaagaaactaacgactaataaaatatagtcttgaatgataagcgagccaatcacacagcaaattgctgcaacgatacttgctaaagaaacatatttaaaaatcttcaatacaataaagaagataattgcaagtattagtaaaagtatcggattgactcccaagacgacacctgcactagttgcaacagctttgccaccttggaattttaaataaacaggataaacgtgtccaagtatagcgaataagccaacaattaaaccatttgtaaaaaaagtactaatagggccatctgcgtgaactggtaaccataaagggaagaaaacagttatgaaccctttgaaaatatctagaaatgttaccaagaatcctgcaggacgacctaatactctaaagctattagtagcgccagtattaccactaccaaattgtctaatatcttttttgaaaaataattttccaattacgaatccacttgggaaagcgccgataagataacttagtagtaacatgacgattatcatcataaatattacacatcctttaatatcttaggactattttatcatattcgtttaaattacggctaaaaattttaaaaacggggattaatatatggaattaagctatgaaagttaattgatacttgcattttacgctgatttatataagaataactattgtatagttttaaaaacgaacgtacgtttgcaggaggcgaaatcattggcaatgaataaacaaaataattattcagatgattcaatacaggttttagaggggttagaagcagttcgtaaaagacctggtatgtatattggatcaactgataaacggggattacatcatctagtatatgaaattgtcgataactccgtcgatgaagtattgaatggttacggtaacgaaatagatgtaacaattaataaagatggtagtatttctatagaagataatggacgtggtatgccaacaggtatacataaatcaggtaaaccgacagtcgaagttatctttactgttttacatgcaggaggtaaatttggacaaggcggctataaaacttcaggtggtcttcacggtgttggtgcttcagttgtaaatgcattgagtgaatggcttgaagttgaaatccatcgagatggtaatatatatcatcaaagttttaaaaacggtggttcgccatcttctggtttagtgaaaaaaggtaaaactaagaaaacaggtaccaaagtaacatttaaacctgatgacacaatttttaaagcatctacatcatttaattttgatgttttaagcgaacgactacaagagtctgcgttcttattgaaaaatttaaaaataacgcttaatgatttacgcagtggtaaagagcgtcaagagcattaccattatgaagaaggaatcaaagagtttgttagttatgtcaatgaaggaaaagaagttttgcatgacgtggctacattttcaggtgaagcaaatggtatagaggtagacgtagctttccaatataatgatcaatattcagaaagtattttaagttttgtaaataatgtacgtactaaagatggtggtacacatgaagttggttttaaaacagcaatgacacgtgtatttaatgattatgcacgtcgtattaatgaacttaaaacaaaagataaaaacttagatggtaatgatattcgtgaaggtttaacagctgttgtgtctgtacgtattccagaagaattattacaatttgaaggacaaacgaaatctaaattgggtacttctgaagctagaagtgctgttgattcagttgttgcagacaaattgccattctatttagaagaaaaaggacaattgtctaaatcacttgtgaaaaaagcgattaaagcacaacaagcaagggaagctgcacgtaaagctcgtgaagatgctcgttcaggtaagaaaaacaagcgtaaagacactttgctatctggtaaattaacacctgcacaaagtaaaaacactgaaaaaaatgaattgtatttagtcgaaggtgattctgcgggaggttcagcaaaacttggacgagaccgcaaattccaagcgatattaccattacgtggtaaggtaattaatacagagaaagcacgtctagaagatatttttaaaaatgaagaaattaatacaattatccacacaatcggggcaggcgttggtactgactttaaaattgaagatagtaattataatcgtgtaattattatgactgatgctgatactgatggtgcgcatattcaagtgctattgttaacattcttcttcaaatatatgaaaccgcttgttcaagcagatcgtgtatttattgctttacctccactttataaattggaaaaaggtaaaggcaaaacaaagcgagttgaatacgcttggacagacgaagagcttaataaattacaaaaagaacttggtaaaggcttcacgttacaacgttacaaaggtttgggtgagatgaaccctgaacaattatgggaaacgacgatgaacccagaaacacgaactttaattcgtgtacaagttgaagatgaagtgcgttcatctaaacgtgtaacaacattaatgggtgacaaagtacaacctagacgtgaatggattgaaaagcatgttgagtttggtatgcaagaggaccaaagtattttagataattctgaagtacaagtgcttgaaaatgatcaatttgatgaggaggaaatctagtgagtgaaataattcaagatttatcacttgaagatgttttaggtgatcgctttggaagatatagtaaatatattattcaagagcgtgcattgccagatgttcgtgatggtttaaaaccagtacaacgtcgtattttatatgcaatgtattcaagtggtaatacacacgataaaaatttccgtaaaagtgcgaaaacagtcggtgatgttattggtcaatatcatccacatggagactcctcagtgtacgaagcaatggtccgtttaagtcaagactggaagttacgacatgtcttaatagaaatgcatggtaataatggtagtatcgataatgatccgccagcggcaatgcgttacactgaagctaagttaagcttactagctgaagagttattacgtgatattaataaagagacagtttctttcattccaaactatgatgatacgacactcgaaccaatggtattgccatcaagatttcctaacttactagtgaatggttctacaggtatatctgcaggttacgcgacagatataccaccacataatttagctgaagtgattcaagcaacacttaaatatattgataatccggatattacagtcaatcaattaatgaaatatattaaaggtcctgattttccaactggtggtattattcaaggtattgatggtattaaaaaagcttatgaatcaggtaaaggtagaattatagttcgttctaaagttgaagaagaaactttacgcaatggacgtaaacagttaattattactgaaattccatatgaagtgaacaaaagtagcttagtaaaacgtatcgatgaattacgtgctgacaaaaaagtcgatggtatcgttgaagtacgtgatgaaactgatagaactggtttacgaatagcaattgaattgaaaaaagatgtgaacagtgaatcaatcaaaaattatctttataaaaactctgatttacagatttcatataatttcaacatggtcgctattagtgatggtcgtccaaaattgatgggtattcgtcaaattatagatagttatttgaatcaccaaattgaggttgttgcaaatagaacgaagtttgaattagataatgcagaaaaacgtatgcatatcgttgaaggtttgattaaagcgttgtcaattttagataaagtaatcgaattgattcgtagctctaaaaacaagcgtgacgctaaagaaaaccttatcgaagtatacgagttcacagaagaacaggctgaagcaattgtaatgttacagttatatcgtttaacaaacactgatatagttgcgcttgaaggtgaacataaagaacttgaagcattaatcaaacaattacgtcatattcttgataaccatgatgcattattgaatgtcataaaagaagaattgaatgaaattaaaaagaaattcaaatctgaacgactgtctttaattgaagcagaaattgaagaaattaaaattgacaaagaagttatggtgcctagtgaagaagttattttaagtatgacacgtcatggatatattaaacgtacttctattcgtagctttaatgctagcggtgttgaagatattggtttaaaagatggtgacagtttacttaaacatcaagaagtaaatacgcaagataccgtactagtatttacaaataaaggtcgttatctatttataccggttcataaattagcagatattcgttggaaagaattgggacaacatgtatcacaaatagttcctatcgaagaagatgaagtggttattaatgtctttaatgaaaaggactttaatacagatgcattttatgtttttgcgactcaaaatggcatgattaagaaaagtacagtgcctctatttaaaacaacgcgttttaataaacctttaattgctactaaagttaaagaaaatgatgatttgattagtgttatgcgctttgaaaaagatcaattaattaccgtcattactaataaaggtatgtcattaacgtataatacaagtgaactatcagataccggattaagggcagctggtgttaaatcaataaatcttaaagctgaagatttcgttgttgtgacagaaggtgtttctgaaaatgatactatattgatggccacacaacgcggctcgttaaaacgtattagttttaaaatcttacaagttgctaaaagagcacaacgtggaataactttattaaaagaattaaagaaaaatccacatcgtattgtagctgcacatgtagtgacaggtgaacatagtcaatatacattatattcaaaatcaaatgaagaacatggtttaattaatgatattcataaatctgaacaatatacaaatggctcattcattgtagatacagatgattttggtgaagtaatagacatgtatattagctaaaaactatatgcaatcacgaaattaaatgataaaatacagtaatgttaaattttgactaaattcaagggatttatattaaatgctgaccaagtacttatcgttaaattagcgatatactttgaccaaactaatataaatctcttgtattgtataagaaatgatgatgtatctctatatttactgaagtttcaattcggtctaattttatagaaggtacatgattcatgtagaggatgcgaggggtttattttgaaagatttcgatagtttaattcctggatggtttaaagaatttgtccatgttggtaccgatttaatatggtctcaatatttaattggtctattattgacagctggattcttctttacaattagttctaaattcgtccaattacgaatgttacctgaaatgtttagagctttagtagaacgtccagaaactttagaagatggtaagaagggtatttcgccattccaagcatttgcgattagtgctggttcgagagttggtactggtaatattgctggtgttgcgactgcgattgttttaggcggtccaggtgcagtgttttggatgtgggttattgcatttataggtgcagcgagtgcatttatagaagcgactttggctcaggtttataaagtacatgataaagatggtggattccgtggtggtccagcttactatattactaaaggtttaaatcaaaaatggctaggtatcgtatttgcgattttaattacaattacatttgcatttgtatttaacacagtgcaatctaatacaattgcggagtcgttaaatacgcaatataatattagtccagtaatcacaggtattattttagcaatcgtaacagctattattatatttggtggtgtacgtagtattgctacgttatcttcgttaattgtaccgattatggctatcatttacattggtatggttttagtaatattgctatttaatttagatcaaattgttcctatgataggtacgattattaaaagtgcatttggtatcgaacaagtaactggtggcgctgtaggtgctgcggttcttcaaggtatcaaacgtggtttattctctaacgaagctggtatgggttctgcgccgaatgcagcggcaactgctgccgtaccacaccctgttaagcaaggtttaatccaatcattaggtgtgttctttgatacaatgttggtttgtacagcaactgcaatcatgattttactatattcaggactgaaatttggtgataacgcacctcaaggtgttgcagttactcaatcagcacttaatgagcatttaggttctgctggaggtattttcttaacaatagcagttacactgtttgcattttcatctgtggtaggtaattactattacggtcaatctaatattgaatttttatcaacaaaccgtgtaatattatttatctttagatgtcttgttgtagtacttgtctttgtcggtgcagttgtaaaaacagaaacagtatggaatacggcagacttatttatgggcttaatggcaattgtaaacattatttccattataggactgtccaatgtagcttttgcattgatgaaagattatcaaaagcagaaaaaagaaggcaagaaccctgtctttaaacctgaaaacttagaaattaacttatttggaattagtgcttggggcgctaacaaatataagaactctgataaataaatatttttaatgtaacgattcattatataaaaatcaaataaaccctgaggttttcaaattaaagcgaaaatctcagggttttaaatttgtactcaataatcatctgtatcattacactagttaatctaagatttgattatatattaatatagtaaggttgagatttatttcctccattggtgtgcaaagactataccattgataagacatattgttggatagatgaatataaatttattttagctttgcacaatttaatagtacgttttagtttgtattgagtattaattcagataatatataaataaatagaattatttgtaaatatgggagtcagatttttttattatagttattccactttgagaggcatcgaaattaaattaagatatatcatataggataggcgtgtaatagaacacaagtatttaaattattatactttcaagttagacatttccgatatataatcttaataatagaaaaataggtgatgataatgggagaatatattgttactaaaacattgaacaacaatgtcgtagtatgtactaataatgatcaagaagttattttaatcggtaaaggtattggttttaacaaaaaagagggaatggcgttaaacgaccaaactattacaatagagaaaatttataaattagagagtgagcaacaaaaagcacattataaaagtttagttgaaatcgctgatgataatgtattacaagtaattattgattcgttgaattttatttctaatactgcgatgaatgttgattcaaaacaacttgtagtttcattaacggatcatattatatttgcttataaacgcttaaaacaaaatcaagttattagcaatccatttgttatggaaactatgcagttatatagtgatgcatatcatattgctaaacaggtgattgatcagttaaatgcagcattagatgtacattttcctgaagatgagataggatttattgcattacatattgcatctaatacagaagatttatctatgcatgagatgaccttgatcaataatgttattaaaaaaggtatagatatcattgaatcagaccttgtgacaactgttgataaggaatcattacaataccaacgttttataaggcacgtacaatttttaattcgccgattaagaagaaaagaatatatacatgcacaagatgattttgtgtctatgattaaaaatcactatccgatttgctataacacagcatataaaattttaactatgatacaaaaacaatttgatgttaatatcagtgagtctgaaattatatatttaacattacacattcatcattttgaagaaaggattaatcaatcctaaattaagtgtattacacgggcgtttcgttactgtaaagggtatttgtatggtatcattgatgttagtaattttacataagtggactgtttttatacaacatcttatgaatattttaagtggtggtgaatctataattgaatgaaaatgaaaagaatataagaaagaattttttaaaatttaccgaatcacggtatatgaagtttgttggtgggaatgatttagtcttctcattaatagcgctagtattgttgggtattgttatttttattttcgaaaaagtatcatatgtttttgatccttttatcatcgtttttaagacgatagcagcacctatcatcgtctctttaattctattctatctatttaacccaatcgtaaatatgatggaacgttatagaataccaagagttgcaggtatttctattatttatctagctgtagtaggtgttattacgttaattgttaatttattgatacctattattggttcgcaagtagatagtttagttaaaaattcaccgcaatatctagaaaaattaattaattctattgataaaatagcaaataatacgtttttctcttcgtattatagtcaaattaatgattggttaaattctttacctaagaaaataccatctatgttaagtgaatttacagatggctttgggtctaaaattgcaacgtttgcagaaacgattgctaatattggcgttgtgattgtcacaacaccatttgtactattctttatgcttaaagatggacatcacttcaaagaattttcaacgaatattatgccaccgaaattccgaaaagattttcatgatctacttgaaaaaatgagtgttcaagttggttcatacattcaaggacaaattatcgtttcattctgtatcggtatactgttgtttatcggttattcggttatcgggttgaaatatagcttagtattagctagtattgcggcagttacaagtgttgtaccatatttagggcctactatagcgatttctccagctattgtaatagctgctataacatcgccgtggatgctcttaaaattagcagtagtatggactttagtacaatttgttgaagggcacttcatttcaccaaatatcatgggtaaaacacttaagattcatccacttacaatcattttcattttactgtgtgcaggcaaattgcttggtattgtaggcgttattttaggtattccgggatatgctattttaaaagtattagttactcatttattccaattatttaaacgtcgatacaatcgtttctatggtaatgatgtaggtgaatatgatattaaagaaagtaataaaatagttgaataagtaataaaaaataccaatgactatatgtttgttggtattttttatggtgcttataatgttgggcagttacatttatgattatcagcacatgtttagcttataaatttttacgaaagtttagccgtttataaagcacatgcataatgaaacgagtatttgccacttgattagtacttcattattatgtcgaaaataaaaacaagtggtatttttaatatattaagaagcactcataatcggctgttaattaataatatttttcataagtattgattcatcattttctttatgttaaatatgaatcagtatagataaccatattgttctgtttgagatagaaatattttctatttacttcttaatacagatatcaatatgacaaaagtgttatataaatcaaaggtaaatgatatgctatttttatggtttatatgatatattttgatttataacagaaataattagaattgatgtgaaaaaatgaatcaggaagttaaaaacaaaatattttcaatcttaaaaattacgtttgctacagctttatttatttttgtagtaatcacattgtatcgggagttatctggtattaactttaaagatacgttggttgaatttagtaagattaaccgtatgtccttagttttactatttattggtggtggggcatcgcttgttattctatcaatgtatgatgtgattttatctagagctttaaaaatggatatatccttaggcaaagttttaagagtaagttatatcatcaatgcattgaatgcgattgtaggtttcggtggctttattggtgcaggcgttagagctatggtttataaaaactatacgcatgataaaaagaaattagttcactttatatccttaatacttatttcaatgttgacaggtttaagcttattatcattgttaattgtattccatgttttcgatgcatctttaattttagataagattacatgggtaagatgggtattatatgtagtgtcatttttcttaccattattcattatttattcaatggttagaccacctgataaaaacaatcgttttgtaggattgtactgcactttagtgtcgtgtgttgaatggttagcagctgcagttgtattatatttctgtggtgtaattgttgacgctcatgtatcattcatgtcctttattgcaatatttatcattgctgcattatcaggtttagtcagctttattcctggtggtttcggcgctttcgatttagttgtattactaggatttaaaactttaggtgtccctgaggaaaaagtattattaatgctacttctatatcgttttgcgtactattttgtaccggtaattattgcattaattttatcatcatttgaatttggtacatcagctaagaagtacattgagggatctaaatactttattcctgctaaagatgttacgtcatttttaatgtcttatcaaaaggatattattgctaaaattccatcattatcattagcaattttagtattctttacaagtatgatcttttttgtaaataacttaacgattgtttacgatgctttatatgatggaaatcacttaacgtattatattctattggcaattcatactagtgcttgtttattacttttactgaatgtagttggtatttataagcaaagtagacgtgccatcatctttgctatgatttcaattttattaatcacagtggcgacattcttcacttacgcttcatatattttaataacatggttagctattatttttgttctgcttattgtagctttccgtagagcacgtaggttgaaacgcccagtaagaatgagaaatatagtagcaatgcttttattcagtttatttattttatatgttaaccatatatttattgctggaacgttatatgcattagatatttatacgattgaaatgcatacatctgtattgcgctattacttctggcttacgattttaatcatcgctatcatcataggtatgattgcatggttgtttgattatcaatttagcaaagtacgcatttcttctaaaattgaagattgcgaggagattattaatcagtatggcggtaattatttgagtcacttgatatatagtggtgacaagcagtttttcactaatgaaaataaaacagcatttttaatgtatcgttataaagcaagttcattagtggttcttggagatccgttaggtgatgaaaatgcctttgatgaattgttagaagcattctataattacgctgagtatttaggctatgatgttatattctatcaagttacagatcaacacatgcctttatatcataatttcggtaaccaatttttcaaattaggtgaagaagcaattattgatttaacgcaattttcaacttcaggtaaaaaacgccgtggatttagagcgactttaaacaaattcgatgaacttaatatttcattcgaaattattgaaccaccgttttcaactgaatttataaatgaacttcaacatgtaagtgatttatggctagataatcgtcaggaaatgcatttctctgtgggtcaatttaatgaagaatacttatctaaagcgccaattggtgtaatgcgaaatgaagaaaatgaagtaattgcattttgtagtttaatgccaacatactttaatgatgccatttcagtcgatttaattagatggttgccagagttagatttaccattaatggatggtctatacttgcatatgttactttggagtaaagaacaaggttatacaaaatttaatatgggtatggcaacgttatcgaacgttggtcaattgcattattcatatttaagagaacgacttgcaggccgtgtctttgaacatttcaacggtctatatcgtttccaaggattacgtcgttataaatctaaatataatccgaattgggaaccacgctttttagtttatcgtaaagataattcgctttgggaatcactttctaaagtaatgcgtgtaatacgtcacaaataattaaaatccaagtgctaagaggtatacagttatgcctgaagcgcttggattttttggtttctataaagaatgatttataaaaaacggtacagataagaatatttaagtttcctatctgtaccgtattttaatattgaaatgagcttaagttaagtcgcctaacttttattatcagtccaatcagtttcatcaagtataaatgttattgcttatttttgtattcttggcgtattttttgttcttctgcatagcgctctggatttttcttataaaaatcttggtgatagtcttcggctttgtaaaattgtgacgcgggtaatatttttgttgcaattgccttatcagcattaatcgtatttttaagctgctcgatataagtctcagcgagttctttttgatgatcattagtgtagaaaatagctgtttgatattgaggaccacggtcttgatattgaccccctgtatctaatgggtcaatgactgagaaaaatatttctaataacttattgtatgagaataatgcaacatcatattgaatttcaacagtttctaaatgaccactcgtacctgattttacttgttcgtaagtaggattttcaatatgtccgcccatatatccagaagttactttttctatgccgtcaaaggtgtcaaatggtttcgtcatacaccaaaagcaacctccggcaaaataagctgtattaatattcatttttgacatcctttcattagaccttagtacgatttattaagaaatcacttgctttttgaattgtttttatataacgttaatatgtgattattatagtacacaaaaatctatttttgaagatataaggtaggtaaatatggataaagaaactaatgacaacgaatatagacgtcaaagtgaacatcgcacttcggcgcctaagcgaaaaaagaagaagaaaattaggaaattacctatcattcttctgattgttgtaattttacttatcgcattagttgtatatattgtgcatagttacaatagcggtgtagaatatgccaagaaacatgcgaaagatgttaaagtacatcaatttaatggaccagtaaaaaatgatggtaaaatttctattcttgtactcggtgcagataaagcacaaggtggacaatcaagaacagattctatcatggttgttcaatatgactttatcaataaaaagatgaaaatgatgtctgtcatgcgtgatatttatgcagatattccaggatatggaaaacacaaaattaattcagcatacgctttaggtggtccagagctacttagaaaaacacttgataaaaatttaggaattaatcctgaatattatgcagtagttgattttactggatttgagaaaatgattgatgaattaatgccagaaggtgtaccaattaatgtcgaaaaggatatgtcgaaaaatattggtgtatctttgaaaaagggtaaccataggttgaatggtaaagaattacttggttatgcaagattccgtcacgaccctgaaggtgacttcggacgcgtgcgacgtcagcaacaagtgatgcaaacattgaaaaaagaaatggttaattttagaacagttgttaaattaccaaaagttgcaggtattttaagaggctatgtgaatacaaacattcctgattcagggattttccaaacaggtttgagttttggtatccgaggtgaaaaagatgttaagtcattgactgtgccaatcaagaactcatacgaagatgtcaatacaaatactgatggtagtgcattacagattaataaaaacacaaataaacaagctattaaagactttttagatgaagattaaaaataaacaaggcgatttctatcatactcagatagaagtcgccttgttcgttttcaaagaattaattggcatgcatcttatgaagaattattgatctgactttcttacgccagccacaccataatggtttggtttcatttcttctataacaacgtgaattgcttgtctatttgcccccgttgttttttctacggcgtcagttacttcgctaactaaattttttaattgttcatccgaacgaccttctaataattttacattgacgattggcatcatccaaacctcctaatcattattaatttgagtatatcatgtaatacttaaaaattcatttgcaaaataacagaacgtttgttctaaaatagttgaaatggaacacgtgttcgtatataatgagattcaagtaagggaggaataacagtgtataattatcatttattagaagatagggatgttctatgtattgaccaaaaaagtttttttgcgagtgtttcttgtattgaaaaggggctagatccattagaaacaaagctagctgttgttgcagatactaagcgtcagggttctgtaatattggctgcgacacctaaattaaaagaattaggcatcaagacagggtcgcgattgtttgaaataccacatagaaatgatatttacattatcaatccaagtatgcgtaaatatcttaatgtttcagttgctatttctaagattgcattgcgttatattccacctgaagatttacaccaatatagtattgacgaattttttatggatgttactgatagctatcatagatttagttctacagtacatgcattttgcgaaagacttaaacgtgaaatttatgaagaaacaggcatttattgtactgtgggcattggttctaatatgttattaagtaaaattgctatggatgttgaagcgaagcatagtcaaaatggtatagctgaatggcgatatcaagatgtaccaacgaaattatggccaattcagcccttgcgagatttttggggtattaatcgtcgaacagaagccaaattgaataaaagaggaatttttactataggagatttagcgaaatatccatataaatttttaaaaaaagagttcggtattttaggtgttgatatgcatctacatgcgaatgggatagatcagagtaaagtacgtgaaaagcacaagatcagcaatccatcgatatgcaaaagtcaaatattaatgagagattatcattttgatgaagcaaaagtagtaatgcaagagttaattgaagatgttgctagcagagttcgagcaagaaaaaaagtggcaagaacgatacattttgcctttggctatagtgatgaaggcggtgtacataagcaatatactttgaaagatccaacaaa

SEQ ID NO: 6 - DNA, 2799802 bp, Staphylococcus aureus strain MSSA476 (residues 1,399,902-2,799,802 of 2,799,802)
cttagaaaaagatatttataaagtagtaatgcatttcgcagataaattatgtaataaacaagcactatatcgtacgctaagtatatctttgagtcaatttattaatgaggatgagcgacagttaagtctgtttgaagatgaataccaacgcaaacgtgacgaatgtctagctaaaacgatagaccaattacatttgaaatacggcaaaggtattgtgtccaaagcagtatcgtttacagaagcaggtacaaaacacggcagattaggtttaatggctggacataaaatgtaatgactatacggtttaagtaatatataactgtgattcgtataaaataagtctctaaagataaatatttcatatatcacaatagatttcacaataatatctaagaatacatggaatttatcaaaagagacttaataattattggatataacaatcaaaatcactcaatgcttgcataccgcgttctcggtcagtagggtttttgaaactaatttttaaagcaccgtatatatcttcgcgtacttctaagattcttaagttgcttatagatatgttatgtaaactcaggatataagtcactttacttatcatacctgattcatccggaatgtctacatatagatcatacgcagtatttagtccacctagttgtttagcgggtagtgcgtcgcgatacgatttagcttgggcaaaaaatgataacaatttttcagaatcattgctttcaattagtctttctaaatcttgaaactgactttttagctgtcgaatcatttctaaaatatacgttttattactcaaggtgatatctttccacatttgtgcattactactagctatacgagtgatatcacgaaaaccaccagctgcaagtttattaactaaatgatgttcttgaccgttcttttgactaacatgaactaaactagatgcaacgatatgaggtaaatgacttacgacgcttgttacgtagtcgtgttcttcagcagtagttacaataaatttagcaagagtaggtgataacagttcttttaacgtgtttgctgcttgctcatttcttggctcattgtagactaaaatataataagcgttttcaaataagtgctttttagcatttagtacaccagatttatgactaccagccattggatgaccactgactaaatgaatattatgctttaataaattgcattcgtgttgctgtatcattgctttagtactaccagtatcagaaacaataacaccaggtttagttggcatatctataagctcgctaagatatttatttgtgatagcaacaggtgttgcataaataattacatcggcttttttaatagcttcactataatttaaacatttttcattaataatgccgattgatttagctttatctaactgagaagtatctgcatcgtatgcaataatattagtattagggttatggtattttatattgctagcaagacttccaccaattaatccaagcccaacaaataaaactgttgtcatataaatcaccttatttcgaaattttcagaataataacattgtaaatgagctgttgacacagtgcaatagtaaataaaaatcgataatagcattaatagataaacggagataaatcatctacaataaagagtatagtaacacaatggcaacggaggggtaaatcaatggaaccaatattagaaatgattaaaacattaacaggtattaatagtccttcaggagacacagaagaagcaattcaatttgtcgaaaaatatgcaaaagacttgggttatcaaacaacactaacaaataaaggtgcgttattaataacagtgccaggcaaaaatgatgaagtacaacgctgtattactgctcatgttgatactttaggtgcaatggttaaagaaattaaagaagatggtcgcttagcaatagaattaattggaggattcacgtataacgcgattgagggtgaatattgccaaattaaaactgatgctggtcaaatatatacaggaacaatttgtctgcatgaaacaagtgttcatgtatatagaaataatcatgaaatacctagagatcaaaagcatatggaaataagaattgatgaagtaactacatcagaagaagatacaaagagtttaggtatttcagtaggtgattttgttagctttgatccacgtacagttatcacgtcatcaggttttattaaatctcgtcatttagatgataaagctagcgtagcgattatactacaattactaaagaaattaaaagaagagcaaataatattaccacatacaacgcaattttatatttctaataacgaagaaataggttacggtgcaaatgcatcaattgattcgaaaatcaaagaatatattgcattagatatgggcgcgttgggagacggtcaagcatcggatgaatatacagtttctatttgtgccaaagatgcttcaggtccatatcataagcaattgaaatcgcacctagttaatctttgcaaaataaataacattccatataaagtcgacatatatccatattatggttcagatgcttcagcagctttacatgctggtgcggatatcagacatggtttatttggcgctggcattgaatcatctcatgcaatggaacgaacacatattgattctattaaagcgacagagaaattactatatgcatattgcttatcaccaattgagtaaacaattagtgttgacaaatgtgaacgacctatgtaatataatgaactataaaaataattagaattttctaaagaaatagtagcagatatgaaacgtagcaaatagaaagctaatgggtgatgggaattagcacgccatatcttgtgaattggactttggaaaacaattgaatgagttttgaaagtgaacatgaattatgttaactaaggtggcaccacggtaacgcgtccttacaggtatatgcgttatgtggtgtctttttatttagacaaaatgtagtagttaattaaaggtagcaacagaaagttagtggatgatgtgaactaacaccgagattaatgaaattgggttttgtctgcaacagaaaaattatatatagtaaagagtgaactatgaatatttcgaatattcggttaatttaggtggtaccacgcgtcagcgtcctttatattgataaggatgctggcgcttttttgaaaggagcgtatagaatggatatattttataaaaaaataaaagcaaatgtaacgccagaagttttagcacaacttcattccaagaagatcattttggaaagtacaaatcaacaacaaactaaaggtcgctattcagttgttatttttgatatttatggcactttaactttagataatgatgtattatcagtaagcactttaaaagaatcgtatcaaatcagtgaaagaccgtaccattatttaacgactaaaataaatgaagactaccataatattcaagatgagcaacttaagtcattaccgtttatatctggatatgttgggacgtgtagctttgatttagtaagacatgaatttcctaaattgcaatcaatacaattagaagatcacaagcagcacgatgtaaggttatatatggttgaacaagtttatgtatttgaccattacaaagatgagttatatatcatcgcgacgaatcaattttcaaattcaacaaaatcagatcttgagaatcgagttaataagtctatcgaagacttaactaaaatccaaccattcatgcctacacaagattttgattttaaaactaaagaaattcaatcaaacatttctgaagaaagatttatcgaaatgattcagtatttcaaagagaaaataacagaaggggatatgtttcaagttgtgccatcaagaatttacaaatatgcgcatcatgctagtcagcatttaaatcaactttcgtttcaactgtatcaaaatttaaaacgacaaaacccaagtccatatatgtattatcttaatatcgatcaaccatatattgtcggtagttctcccgaaagtttcgtaagtgtcaaagatcaaattgtaacaactaatcctattgcaggtacgattcaacgtggtgagacgacacaaatagataatgagaatatgaaacaactacttaatgatccaaaagaatgcagcgaacatcgtatgctagttgatttagggcgtaatgatattcatagagtaagtaaaatcggtacctcaaaaattactaaattaatggttattgaaaaatatgaacatgttatgcatatcgtaagtgaagtcacaggtaaaataaatcaaaatttatcgccaatgacagttattgcgaatttattaccaacaggtaccgtttcaggtgcaccaaaattacgtgcaattgaaagaatatatgaacaatatccacataaacggggcgtttatagtggtggtgttggatacataaattgtaatcataacttagattttgcattagcaattcgaacgatgatgatagatgagcagtatatcaacgtagaagctggttgtggcgttgtatatgattctattcctgaaaaagaactgaatgaaacgaaattgaaagctaaaagcttattggaggtgagcccatgatcttagttgtagataattatgattcctttacatataacctagtggatattgttgctcaacatactgacgtcattgttcaataccctgatgatgataatgtgctgaatcaatcggtggacgctgttattatatctcctggtccagggcatccattagacgatcaacagttgatgaaaatcatatcaacctatcaacacaaacccattttaggtatatgtttaggggctcaggcactgacttgttactacggtggagaagtcattaaaggcgacaaggttatgcacggcaaagttgatacactaaaggttatatcgcatcatcaacatctgttatatcaagatataccagaacagttttcaattatgagatatcattcattaataagtaaccctgacaattttccagaagaattgaaaattactggacgtaccaaagattgtatacagtcattcgagcataaagaaagaccgcattatggtattcagtaccatcctgaatcatttgctacagactatggtgtcaaaataattacaaatttcattaatctagtgaaggaaggatgaaaaccatgacattactaacaagaataaaaactgaaactatattacttgaaagcgacattaaagagctaatcgatatacttatttctcctagtattggaactgatattaaatatgaattacttagttcctattcggagcgagaaatccaacaacaagaattaacatatattgtacgtagcttaattaatacaatgtatccacatcaaccatgttatgaaggggctatgtgtgtgtgcggcacaggtggtgacaagtcaaatagtttcaacatttcaacgactgttgcttttgttgtagcaagtgctggcgtaaaagttataaaacatggtaataaaagtattacctcaaattcaggtagtacggatttgttaaatcaaatgaacatacaaacaacaactgttgatgatacacctaaccaattaaatgaaaaagaccttgtattcattggtgcaactgaatcatatccaatcatgaagtatatgcaaccagttagaaaaatgattggaaagcctacaatattaaaccttgtgggtccattaattaatccatatcacttaacgtatcaaatggtaggcgtctttgatcctacaaagttaaagttagttgctaaaacgattaaagatttaggtagaaaacgtgcaatcgttttacatggtgcaaatggtatggatgaagcaacactatctggtgataatttgatatatgaattgactgaagatggagaaatcaaaaattacacattaaatgcgactgattatggtttgaaacatgcgccgaatagtgattttaaaggcggttcacctgaagaaaatttagcaatctcccttaatatcttgaatggtaaagatcagtcaagtcgacgtgatgttgtcttactaaatgcgggtttaagcctttatgttgcagagaaagtggataccatcgcagaaggcatagaacttgcaactacattgattgataatggtgaagcattgaaaaaataccatcaaatgagaggtgaataatatgacgattttatcagaaattgttaaatataaacagtcacttttacaaaatggctattatcaagacaaacttaataccttgaaaagtgtgaagattcagaataaaaaatcttttataaacgcaattgagaaagaaccaaagctagcaattattgcagaaattaaatcgaagagtcctacagttaatgacttacctgaacgagatttatcgcaacaaatctcagattatgaccaatatggtgcaaatgccgtgtccattttaactgatgaaaagtactttggtggtagttttgaaagattacaagcattgacgacaaaaacaacattacccgtattatgcaaagactttattatagacccgcttcaaattgatgttgctaaacaagctggtgcatctatgattttattgatcgttaacatcttatctgataaacaattgaaagatttatataactacgctatatcgcaaaatctagaagtgttagttgaagtacatgatcgccatgaattagaacgtgcctataaggttaatgctaaattgattggtgtaaataacagggacttaaaacgatttgttacaaatgtggaacatacaaatactattttagaaaataaaaaaacaaatcattattatatttctgaaagtggtattcacgatgcatctgatgtaagaaaaatcttgcatagtggtatcgatggcttactaataggtgaggcgcttatgcgttgtgacaatctatctgaatttttaccacaactgaaaatgcaaaaggtgaagtcatgatgaaattgaaattttgtggctttacatcaataaaggatgttacagcggccagtcaattacctattgatgcgataggtttcatccattatgaaaaaagtaaaaggcatcaaacaattacccaaataaaaaagttagcgtctgctgttccaaatcatatcgataaagtatgtgtcatggtaaatcctgatttaacaacaattgaacacgtattaagcaatacgtcaattaacacaatacagttacacggcacagaatctattgattttatacaggaaattaaaaagaaatattcaagcattaaaatcactaaagctttagctgcagatgaaaacataatccaaaacataaataaatataaagggttcgtagatttatttattatcgacacaccctcagtgtcgtatggtggtaccggtcaaacatatgactggactattttgaagcacataaaagacataccttatttgatagcaggaggcattaactctgaaaatattcaaacagttaatcaacttaaattatcacatcaaggttatgatcttgcatcaggtatagaagtaaatgggcgaaaagatatagaaaaaatgacagcaattgtaaatattgtgaaaggagatagagacaatgaataaacaaatacaaacagaagcagatgaattaggtttctttggtgaatatggagggcaatatgttccagaaacattaatgccagcaattattgagttgaaaaaagcttataaagaggcaaaagcagacccagagtttcaaagagaactggaatactatttatcagagtatgtaggacgcgcgacaccacttacatatgctgcatcatatactgaaagcctaggtagcgctaaaatatatttgaaacgagaggatctaaatcatacaggcgcccataaaattaataatgcgttaggtcaagcgttgcttgctaaaagaatgggcaagaagaagcttgttgctgaaactggtgcgggtcaacatggtgtagctagtgctacggttgctgcattatttgatatggaacttgttgtctttatgggaagtgaagatattaaaagacaacaacttaatgtatttagaatggaattacttggtgcaaaggttgtggcagttgaagatggtcaagggactttatcggatgcagttaataaagcattgcaatattgggtaagtcatgtagatgatacacattatttattaggttctgcattaggtccagacccgttcccaacgattgttagagattttcagagtgtgattggtaaagaaataaaatcacagatattgaagaaagaaggtcgacttccggatgcaattgtagcatgtatcggtggtggctcaaatgcaatcggtacattttatccatttattaaagatgatgttgcattatacggtgttgaagccgcaggtcaaggcgatgatactgataaacatgcacttgcaattggcaaaggatcacctggcgtattacatggtactaaaatgtatttaattcaagatgaagatgggcaagtgcaactagcacattctatttcagcaggacttgattatcctggtattggaccagaacattcttattaccacgacattggtagagtaacttttgaaaatgctagtgatacacaagcaatgaatgctttaatcaactttacaaaacatgaaggtattatacctgcaattgaaagtgcacatgcactgagttatgttgaaagactagcgcctacgatgtcgaaagaagatattattgtagtaactatttctggacgtggcgataaagatatggaaacaattagacaatatatggtagagcgaggtcttgcaaatgactaaattatttataccttatattatgggcaataaagatttgattgaaaatgcaacattgttgagtgaaaatggtgcagatataattgaaattggagtacctttctctgatccggttgctgatggtccagttatcatggaagcaggtcaacaagcgattaaacaaggcatcacgatagattatattttcaatcaattagaaaaacatggtgatcaaattaagtgtaactatgtattaatgacgtattataatattatttgtcattatggagaacaagcgttttttgaaaaatgtcgagatactggtgtctacggcttaattattcctgatttaccatatgaattatcgcagcgtttaaaacaacaatttagtcactatggcgtcaaaatcatatcgttagttgcgatgactactgatgacaaacgtataaaagatatcgtatcccatgcggaaggctttatttatactgtgacgatgaatgcgacaacagggcaaaacggtgcgtttcatccagaattaaaacgaaaaattgagtcaattaaagcgatagccaatgtgccagttgtcgcaggatttggtataagaacaccacaacatgttgcagatataaaagaggttgcagatggcattgtcattggtagcgaaatcgttaagcgatttaaatctaacacgcgtgaggaaatcattaaatatttacaatctatccaacaaacattgaataattaagtttacttgatttaaaaaaattaggcgaatactgtttgaaaaagtgaaaaacggtgaattataaaattgaatagaaatgatacaaaagtaatatgagcaaacccaaacgttcatattactttttttgaaattgtatgcaaaaatctaaatattactataaaagtatacgcaattaaagcgtttatgttttagttttaacattaactattgtatacttatttagattagatttattatttttgacatttgcagaggggaaatagaaaaactgcaaatacggaaatgaaattaattaacgagagacaaataggagtaatgataatgaagtttacaaatttaacagctaaagagtttggtgcatttacagatagcatgccatacagtcatttcacgcaaactgttggccactatgagttaaagcttgctgaaggttatgaaacacatttagtgggaataaaaaacaataataacgaggtcattgcagcttgcttacttactgctgtacctgttatgaaagtgttcaagtatttttattcaaatcgcggtccagtgattgattatgaaaatcaagaactcgtacactttttctttaatgaattatcaaaatatgttaaaaaacatcgttgtctatacctacatatcgatccatatttaccatatcaatacttgaatcatgatggcgagattacaggtaatgctggtaatgattggttctttgataaaatgagtaacttaggatttgaacatactggattccataaaggatttgatcctgtgctacaaattcgttatcactcagtgttagatttaaaagataaaacagcagatgacatcattaaaaatatggatggacttagaaaaagaaacacgaaaaaagttaaaaagaatggtgttaaagtaagatttttatctgaagaagaactaccaatttttagatcatttatggaagatacgtcagaatcaaaagcttttgctgatcgtgatgacaaattttactacaatcgcttaaaatattacaaagaccgtgtgttagtacctttagcgtatatcaactttgatgaatatattaaagaactaaacgaagagcgtgatattttaaataaagatttaaataaagcgttaaaggatattgaaaaacgtcctgaaaataaaaaagcacacaacaagcgagataacttacaacaacaacttgatgctaatgagcaaaagattgaagaaggtaaacgtctacaagaagaacatggtaatgaattacctatctctgctggtttcttctttatcaacccatttgaagttgtttattatgctggtggtacatcaaatgctttccgtcattttgccggaagttatgcagtgcaatgggaaatgattaattatgcattaaatcatggcattgaccgttataatttctatggtgttagtggtaaatttacagaagatgctgaagatgctggtgtagttaaattcaaaaaaggttacaatgctgaaattattgaatatgttggtgactttattaaaccaattaataaacctgtttacgcagcatataccgcacttaaaaaagttaaagacagaattttttaggaagggaattatcaaaacatgaaatttacagagttaactgttaccgaatttgacaactttgtacaaaatccatcattggaaagtcattatttccaagtaaaagaaaatatagttacccgtgagaatgatggctttgaagtagttttattaggtattaaagacgacaataacaaagtaattgcagcaagccttttctctaaaattcctactatgggaagttatgtttactattcgaatcgtggtccagtaatggatttttcagatttaggattagttgattattatttaaaagagttagataaatatttacagcaacatcaatgtttatatgttaaattagatccgtattggttatatcatctatatgataaagatatcgtgccatttgaaggtcgcgagaaaaatgatgccctagtaaacttgtttaaatcacatggttacgagcatcatggctttacaactgagtatgatacatcgagccaagtacgatggatgggcgtattaaaccttgaaggtaaaacacccgaaacattgaaaaagacatttgatagtcaacgtaaacgtaatattaataaagcgataaactatggtgttaaagtcagattccttgaacgtgatgagttcaatcttttcctagatttatatcgtgaaactgaagagcgtgctggatttgtatcaaaaacagatgattatttttataactttattgacacatatggagataaagtattagtaccattagcatatattgaccttgatgaatatgtgttaaagctgcaacaggaattgaatgacaaagaaaatcgtcgtgatcaaatgatggcgaaagaaaacaaatcagataaacaaatgaagaaaattgcagaattagataagcaaattgatcatgatcagcatgaattattgaatgcaagtgaattgagcaaaacggacggcccaattctaaaccttgcttctggtgtttattttgcaaatgcatatgaagtgaattatttctcgggtggttcatcagaaaaatataatcaatttatgggaccatacatgatgcattggtttatgattaactattgcttcgataatggttatgatcgttataatttctatggtttatcaggtgattttacggaaaacagtgaagattatggcgtataccgctttaaacgtggatttaatgtacaaatcgaagaattaataggggatttctataaaccaattcataaagtgaaatattggttgttcacaacattggataaactacgtaaaaaattaaagaaatagatgtaaatgatgttagggcttatagttattgatactataggctcttttttatgctttttttagcgaaattttaattatttcacactaagaaaaactagtatgtatttgtcaatctaatgtttttcattataatgatgttttattgatttagttttatgattaaaagattatgcaaaacataaaatatatagcgtcatatttgagttttaatgataatatttttataatatataatataaaataatggttatctgagtatgaaatgcaagtaagtgaggtagttaaaaaatgaatcgaattgaaaaacatgccaaaaacacttttattattctgatgctcattatgttattttggatttttatgagttttattttccagaaattattatttccaccttcgaaaaataatttaactacatatgaagcattaaaatattatacacatttaaagggatattacggtttggatcatatatcaaaaggaatagcatacattgcctgtgtgttaattccattcaatttcttttttagattcaatgacatcaaaaaagataataactataataatattataagtacgttattcctattattatactttttagttaatggaatttcgttgattattcaaggattcactgcagaatttacaattagtttaattagtgagtcaaatattcataataatcatgaatttgctgtgaacttatttagatatgtcatacaagaaggtggtatttcttttagtacatatctagtgtgtaacttttctataataatgtggttattcttttcgtgttctttattaaaagaacgaaaaccagttgtcagatgtttaccattaattatatcttgtttaaaattaatattaatcctacttttttactttcaatacttttggtcatatatcaaactcaatctgcacaaatcttatttatttttatagattttctaaattttgtcgcgttaattttagtttatttatgtactaatcctaataatagaggtattgataaaatagcatgtgttaaataaaaagttaatagtaactacaaacatactttactaataatcaaaacgacttatacaaactcgaagttatataagtccccttatggaatctcacactctagtttacataatatatattataggaagttatgtgtgtgtaacgcaaaaggtaccctacatcataatcattatctaatatcgtcacataacttacttatgctataatcatggtattatattgtttggagtgatttgatgagatttgtctttgatattgatggtacgctttgttttgacggccgattaattgaccagactattattgatacattgttacaattacaacatgatggtcatgaacttatatttgcatcagcacacattaattggcgcaaatggtgctatgatttcacagcaatcaaagatttctgttatcaaaccaattcatacagatacatatcaccatatcttaaaaataattcaaaagtatgagttagattatattattgatgatgattggaattatgctgcacaacttgacgctgagaacgcgatttttgagcgtttagatccacataagctggccagttgtattgatgttgcaaatatcgacacgccaatcaaagttattttattaaatatagacccggcacaaattacaactatattagacgagctaaataaataccatcaagaattggaaatgattcaccattcaaatgagtataacattgatataacagcgcaaaatattaataaatatactgcattacaatatatatttgatgcagatgttaaatatatagcatttggtaatgaccacaatgatattgtcatgttacaacatgctagtagtggctatattataggaccatcagaagcatacacacacgcaatattgaaacttgataaaatcaaacacatcaataataatgcacaagctatttgcaaagtcttaaaatcatataaataaaaaacacccctatcaaatgataatcattatcaatcgataggggctattttaataaaattcgtcctcgaacatttcttcctcttcatctaatccaaataattctgccatttctccatgttcaattaacatgtttaaatatgcatcgcggagttcttcttcactcatatcattaatcatttctttaagactatcaatccacatatttctgcgtaattgatagtcttcttcaacttcgtttaacatcattatatgtttatttgctgcttctggactagctgtaaagagtaatgcaatcatatgtttacatatcactcgtcttccatcagcatgaggacaattacatttggattttctaggatgttccatatcaatataacaacgatatactttgttgccactgccctttacttcagcctcatgctgcgtttctgaaaatgattttaagttaatgacgcattcactttgataataattaaagcctctttctatagaacgaatacttgcaatatcaagtaatcccattaatgatactcctttttattattatttttaaataaagaaaataaaataaataagtgtctagattaatatacttaattcatctatattttataacaagtctagaattatcgcattcttaaatagctaatatgaaaatgcttgcactaattcttttgtataagggtgtctatcaacattaaataattcctctattgcaaaatcatcgactatcatgccatccttaagaacgataattctattaactaagcgttgtaacacggataaatcatgagaaataacgataaaatgatttaagttcgtaatcgtttgcgcttttaatatatttattacattttgttcagctataacatctaaatttgaagttatctcatcacatattaaaacgcgaggctgtgctaataacgaacgcatgacattaaatctttgtaattgtccgccactcacttcgcttggtaatttagtcaataattgcgcgtttaactcaaaagtagataaatgttgtaataataattgatcctgagcagtattatcagttaggcctctgtaataatataacgcttcttttaatgaggtctcaatcgtccaatcagggttaaagctagttaaagggtgttggaaaatcggtaacacagcattgtcacttaagtaaatttctcctttagcaggtttaaacaagccaagaaccaatgaagcgagcgtacttttaccacagccactttcgcctaaaataccaacattttctccatcaggtatagtaatattgatatcttgtagcaccatctgctttttattataaccaaaagtcacatgttttaactcaatcatagtaatccctctttaattgtgttctatatttaattagacgttcagtatacggatgcaaatgctcatacttgaaatgattaatattacctcgttcaatgatttgaccttcttttaaaacataaatgtactgacaatatttcaatacatgacttaagttatgtgtgataataaataatgtttgaccatgttctaatacaatatgctgtaataaatccatcacttgattaccgttcaaagcatccaatgatgcaactggttcgtctgcaatgattaatttaggctccaacatgagaacgcttgctatgtatacgcgttcaagttggcccccagaaagttggaaactatatttatttaatatatctttgctttgtaaattaacccacgacaaagccttatcaactttggacaaagcctcttctttactacctttataatgcttacgataaatcgcagttaactgtttacctaatttagtatggtcgttaaaactttctgcataattttgagaaatatagccaattgtatgaccataatattgactcaatctactaacattttccccatcaaattggtacgaatcatacgtgcagcttaaatcaaatggtaaatattcaagtaaagctttagcaatcaaactttttccagcgccgctctctccaatcaaggcattaatctgttgactaaaaattttcaaatcaatccctttaataagagatttctcactagtattctttattgttaaattttgtatatcaatgagactcatcatattcaccccgttgtttcagcaatctatctcttagtgcatcaccggttaaattaaaaattaaaatagttatagcaatgactgaagcaggtgcaatcaacataattggatgagacgaaataaaatcacgaccttgttgcaacatagcgccccactctggtgttggcggttgtgcacctaacccaataaatgatagtgaacttatatatagaatgattttaccgaaatcaacgaccatcaaaacgataatagccggtataattttaggtgttaaatgacgtattaatattgttcttgttggtacatgaaataattgtgccatttttatataaggcttattcatttcgctattaactatacttctagtcaaccttgtgtaattcatccattttattaatgtaattgagataactaaattccataaagatggttgaaaaaaacttgctaaagcaatcatgatgataaattctggaatactcagaccaacatcaataaaccttaacactaatcgttcaatccacccttttttatatccggcaaatagacctagtgtaacacctatgacaacgatagctattaatgttaaaacagtaacaaacaatgttgaacgtgcaccgataataattcgggtaaataaatctctcccataatcatcagttcctaataaatgcaaccaactaataggttcaaaagtttgtgataaattgactttggttgcattttcactactgacaaagaattgcagtacaattaccacaaaaataaatgcaacgaatacaaaaaatatcaggttattctttgaaaatattttatgcatgacggtcactacttactgatatcaatggtgtattggttttgatttttggatttcctaattgtaaacgctgcttcggatcaagtaataacgttaataaatcagcaatcgtattgataataacaacgaagaagccaataaataacacgcatccttgaataacaggataatctcgagatttaatactatccattaatagataaccaataccaggtatatcaaataaattttcaatcactacagtaccacctattagactgccaagtgaaatccctagtaatgggataatcggcaaaattgttggttttagtaaatcatgaattaaaatataacgttcattcataccgcgtaatcttgatgcttgtacgatattactttgcaataacatcaataaattagaacgcactaaacgaatgatgtatgcacacatacctaaagatagcgtgattacaggtaatataaactgacttagtataacgctatctatattcattaaatttgtgacaataaataataaaataataccgataaagaacgctggtaaactaatcgatagtgttgagatcactctaatcactttatccgtccacttatgaaatcgtttggctgctataatgccgagcggtatagatatgcataacgacactactaatgttgaaaatgatatgagtaatgttatgggtgcatagttgaataatatctgtgttaccggttcttttgattcaaaactttttcctaaattaaaatgtaataaatgattcatccaatgccaccactgtaccaataaagaatcatttaatcccaatttatctttggttgcatttatttgttccgtcgacacttgtgctacatcaagatgtaatattttatcaacaggattgcctggtgataatttcattaaaatgaatgtaagtgtagaaataacaaataaaacaactatcatttgcatcagtctatacaacatagactttattatgaacataatagtccccctccttgtgtaagttactaacactttctttttacatgagaatggcgcatgtatatgcaacttacatattaagaaccaacgttcattatagtattatccataaagaaattgaagtatatttaattttttaacaaaatcattataaaatataatattttgaatcaagtcaaccatgtaaaatataaaaaagtcaaaacaaaaacaactatagcactgtattccatctctttcgaaataattgttactgcagtgtaacttaaaagtcgatgattttgtgcatatagttgtcgaatattattttttatctttacggcgaagttcagcgccctcatagccgtatttttcaatttgcttttctaatttacgcgcttttctttctttacgccaatttctagtaaaataccataatagaaaactaattaataaactcataatcgctaaaaatgcagcgtatcctaataatggttgatattttatatcttgaaaatttggaataaaaaatgcaagcacacctaatataacaaatgtaattactgcagatacaaaccatttatttaaaactaagcaacagaatattgttaataaaatcattattaatgttgtgatccataaataattaggcatatcgaataatgtcatattcattctccttttatttcattactttccttgtatacattttattataaatttttaaaaacttaaacaatagcagtcagtttcaagcaatattctatctactattagaaaaatcattgttccttgcgacatggaaatcgtaacattatcgtttaggagacaaaattatgtataatgaatgtattataccaaaggagtgattatatgtctcaaggtttacctttaagagaagatgttcctgtttcagaaacatgggatttagtagacttatttaaagatgatcaacaatattatgaaagtattgacgctctagtacaacaagcaaatcaatttcatcatacatatgcaacaacattaaattcaatcgaacaaattaatactgctttagctgaattagaaaatattttaattgccttagatcgcttaagtaattatgcagaactacgtttaagtgtagatactagtaatatcgaggcacaagtattgagcgctaaattatctactacatacggtaaaattgttagccaattatcatttgtagagtcagaaatacttgaattaccagaagaaatacttcaacaattagaagaatcatgtccatatcaacactatattaaacagttaataaaacaaaagccattccaattatctgcgtcggtagaacaagtattagcaactttatcacctacgctaaacagtccttacgatttatacggcacgacaaaaatgctagatattacattcgattcatttgaacatgatggtacaacgtaccctgtcgactatgctacgtttgaaaatgattatgaagataataaagagcctgagtttagacgtaaaagtttcaaatcgtttagcgatgggattcgaaaatatcagcatactaccgcggctacatataatatgcaagtacaacaagaaaaaattgaagctgatttacgtggatttgaatcagtcatcgattatttattacatagtcaagaagtaacgcgtgatatgtttgaccgtcaaatcgatatgattatgcgtgacttggcaccagttatgcagaaatatgctaaacttttacaacgtattcacggattagataacatgcgttttgaagacttgaagatttctgtagaccctgattatgaaccagagatttcaattgaagactcaaaaaattatattttcggtgcgttaagtgttttaggtgatgactatacaaacatgttacgtgaagcatacgatcagcgatggattgattttgcacaaaataaaggtaaagatacaggcgcattttgtgcaagtccatactttacacattcatatgtgtttatttcttggactggtaaaatggctgaagcatttgtcttagcacatgaattaggtcatgcaggtcattttacattagctcaaaaacatcaaccatatcttgaatcagaagcatcaatgtactttgttgaagccccttctacaatgaatgaaatgttgatggccaattatttatttaacacaagtgataatccaagatttaagcgttgggttattggctcaattttatctagaacatattatcataatatggttacccatttattagaagctgcttatcaacgtgaagtgtatcacaaagtagatcaaggtgaatctttaaatgcgccgacattaaatgaaataatgctaaatgtttataaacaattttttggagatgcagtagacatgactgagggtgctgaattaacatggatgcgtcaacctcattactatatgggattatattcgtatacgtattctgctggcttaacaatcggaactgtcgtttctcaaaagattaaaaatgaaggccaaccagctgttgatgcttggttagaaacattgaaaaaaggtggtagtgtatcacctgtcgaacttgcaaacattgcaggtgtagacattactacagaacagccacttaaatctacaattcaatatatttctgatttagtcgatgaagttgaaaaattaacagatgaaattgagcaagcaaataactaagatgcgagacaatttatagtagaacaatataaaccaagattttcacattactaattgtgagaatcttggttttttgagggtttatgaatgatagaaatatatatttatcgtaagggattttatagtaataactttaagttattgttcgtaatgtgtacctgttaaataaaaataaacactttcagcgatgttaataatatgatcaccaatacgttctaaatgtcttgctgctaaatgagcttgtgcagcgacaaatggatcgttatcaataagatacgttgcgttaataatatgactatataagtcatcgatatcttcatcacgctcaattatttctcttattaatacggtatctttctttttaaatgcttgatctaagtcctttaacattaacatagctaatttacccattgtctttaaacgggttaacacataatcatctgtaatctttgtacgcaatcgaatattggcaatactcgatgcattatctcctattctttctaaatcggaggcgatttttaatgaagaaatcatcatacgcaaatcactcgcaatgggctgttgctttgtaattaacatgataactcgctcattaatatcataatttaattgattgatatgtttatcgtttttaactgtttgtcgtgcaaagcctctatcgtcaatacttaatgattttataccattttcaatactcacatagacatttgcacctaaccgacgtaattcctttattaaatcatcaagttgctcctgatatcgctgtctaattattgccattatatatcaaccaaaccttcctgaaatataatcttctgttttcttgtttgatgggttagagaaaattttatcagtatcatcatattcattgacataaccatttaagaaaaatgcagttttatctgatacacgagctgcttgttgcatattatgtgtaaccataataattgtatacttttcttttagttcttgaaccaactcttctactcttaatgttgagattggatctaatgctgatgtcggttcatccattaaaatgacttcaggttcaattgctaaacaacgcgcgatacaaacacgttgttgttgcccaccggataaactatatgcatttgtgtgcaacctatcctttaattcatcccaaattgcagcgccacgtaatgatttctcaacgatttcatcaagaacttttttatttttaataccgtgaatctttggaccgtaagtaatattatcgtatattgattttggaaatggattaggttgttgaaagaccatgcccacatttgtacgtaattgttctttagaatatttttgatcaaaaatgtcttgatctcgatataatattttaccagctgttttcacagaaggtactaactcaaccattcgattcaaagttttaatatatgttgatttgccacaaccagatggacctataatggcagtaatttggttttcataaatatctaaattaatattttgtaatgcatgattttcgccataccataagtctaaattttgtgttgaatatataacagaatgtgagtttgtatcatctggtgttttatgatgactttgtgagacatcaaacgtatgactttgagatatttgtttagtttgtgcaagtgtttgcgccatatttaaaactccctttttaatagataaatgagattgattgtttaaattagaattttttactaaatttgttacgtaaaataatcgcaacgccattcattaagattaagataactagtaaaacgataatgcctgccgatgcaacattctggaattcttcttgaggcattttcgcccaagtaaatatttggattggtaatgctgaaaattgatccaatatacttctaggtgttgccaataatatagtcggtataccgattagcacaagtggcgctgtttctcccagtgctcttgaaagagacaaaatgaatccagttaaaataccaggtaacgctgctggtaagacaacacgtcttatcgtttgccatttattagcacctaaaccataagaagcttcgcgtactgagttaggtacagctctaattgcttcctgacttgaaacaataataattggtaatatcagtaaggtcattgttagcgctgctgccaatatactgttacccattttcaaggcttcaatccccgcaccaccaacgaacaaagtgtaacctaatatcccaaatacaactgatggtacaccagctaaattggaaatactgattttaacaaactgagtaaatttgttgtttttcgcatattcttctaagtatatagctgtacctattcctaggatgattgataatggaatgatacttaacattaaccaaagtgaaccgattaacgcgcctttaacgccagccatagatggtgttgaagaagaaaaattagtgaaaaactgtaaatttaaatgacttacccctttaatcaatgtttgagttaacaacgcaataagtacgacaagtcctaataatgtacatgctaaaaatatgagtttgaacactttatttttaaccgttctggatgataaatgtttttggacaagttgttgatcgacgagtgattgtctattattatctgtcgtttccatattaatactcctccctaaaacgcttagaaatccactgagaaagtaaattcatgattaaggtaaagataaatagtgtgaaccctacagcataaatactgtaataaatatttgatccaaatgttgcatcacctgtcgctatctcaacaatatatccagtcattgtttgaatcgaacttgttaaacttaatgaagctgttggcgaactacctgccgctaatgatacaatcatcgtttctccaattgctcttgaaatcgcgagaacgattgaagctacaatacctgatgttgctgcgggaagtacgactttagttgctacttctaatttagttgctccaagtccataggcaccttctcgaattttatttggtacagatgccattgcatcctcactcaaacttgtgatgagagggacaatcataataccgacaactaagccgggacttatagcattaaactctccaagacctggtatgaaagatcttaatactggtgtaacaaaggttaatgcaaagaaaccaaacacaattgttggtattcctgctaaaatttctaatatcggtttaattatgcgtcgtgcacggtcacttgcatattcacttaaataaattgctgcaccaagcccgactggaactgcaaatatagtcgcaataactgtgatttttaaagtccctattatcaatgcccagataccaaacttagggtctgaaccggtaggattccaagtagtagaaaatagaaattcagttattggaattctggtgaaaaaagtgatggtttctaaaagcaatgtgattaatatacctagtgttgttaaaatggaaatcgctgaaattgcggctaaaataactggtataattttgtcattatgcttcccttttttattattatttttttcgattaaagctttaacattagtagatgaagtcataatcaaacctctttctattactcccaaaataattagatttgtaaaataatgatgaaccactattttaagttgataagcttgtagactaactgaatgtcaaaatcagcgtctcgataaatcaagctttgtactctaaataatgattcaccatcaaaatcatgtttcaagacacatttgaaattgcgtcttattattttttgtcttcagactttttatcatcagatttcttgtcgtctgatttttgatttttatcaataaatgcttttaaatcatctaattgtgatttgtatgttttctctggtgctgctacatatccagcttcttcagctgctttacctttatcttctaagacgaatttgataaattctgacattactttattatctttcaatgctttttcatttacataaatgaataatggtctacttaatgcataagagttatcttgaattgtttttttcgtaggctctgttgctttaccattttcatctttgattttaacttcttttaatttatctttattttgtacgtagaagttatatccaaagtatccgattccctctttgtttttcgttacagaagaaacgatagcatttgtatcagcatttttttctgctttaatatcttctttattcattacttcattttcaaagaagtcataagtaccatgacttgagtttggtgatacagcatttatttttttatctggccatttactattaacatctttccatgttttagcttttccagaataaattgcttttaattgctgtttgtctaattcatctacaaaatcattttctttatttacagcaaccgttacaccatcttgcgcaattttaaattctttgtatttgatattcttatcttgtaatttttgcttctcttcatctttaattggtctagaagcatcagcgaagtcgatatctcctgcaatgaatttttggaaaccagcacctgtaccagcttgtcctgctgagattttagcatccgagtgatcttgagcccatttttcatttaatttctccacaattggtgctactgttgatgagccatcacctttagcttccccttttaaatcactattaccactgccaccattaccgccaccacaagcacctaataatagtgttgcacctaaagctgtagtaccaacaaattgccattttttcattgaaatatcctccctgtatgaacaacaaatagtatttgtattgattacatctttatcttaaccttgaattattaacctcatttttagaaactgtaaatgttacataaaaatttgttaagaaaatgtaaatattaatttttgttaatctaaaaaatattgcttcattagtaaaattaaaatgcttcctgaaaaattatcgaaatttaaatatgtacacaaaaaaatgaggctgggacataaatccctaaaaaaacagcagtaagataattttcaattagaaaatatcttactgctgttctctatttatacaatacttcgtattgaatggcttcgctttgcccgtctggcacattactgtaaaattctataaatagaatttttgatgacgggtcccttcctagggtgccgtctcagccaccccaaccggcacattgttgtaagctgactatatgtcagcttctgtgttggggcccctgtcttcgactggcactgctccctcaggagtctcgccattaatactacgtattaacatgtaattttactttgaaatacattaaagcccaaattaatcaaaagctttctgaaccagaaacgaaaaaaaatctatagtcatagaaaaatttatgtagagcctgtttttggatttatgaaggttattttgggtttcactcgaatgtcagttcgaggaataaataaagttaaacgagagctaggttttgtattaatggcacttaatataaggaaaatagcagctcaacgagctgtacattataaaatacatatcaaaaaagctaatttccatcaaataattaatagaaatcagcttttttacattgcctaagaacttaatgtcccagcctattcgtttgaattatttaattttttactttgaaaggaatgtttaaaaaactacttcatctgtccgatttaatattgaataaaaaaacacgcatcctacgacacgtgtaaaaatgattattcttttgagtccattcgactccaaccttttttagttaaagtgattttacctgtttctatattaataatcttctgtttatataagtgaccgattgcacgtttgaatgaacctttactcatattgaatacttctttaatcgcttcagggcttgatttgtcccagaatggtaattcaccatcatattcaactagtaaatcaaagatgacttggccgtcatcgtctaaacgttcatgtgcaagtggtaaaaatgaaccatttaactcacctttatcattatgcccgataattctaacttgaacagattcacctaatcttggttcagctttacgttctgattcatgtacgaaaattttgtaacctgattcgcttaataaaaagctaccaattcgtaatacgcggtaaggtttggcttcaatgacttcgttttttaaattatcgtcgtgtacaggtgtaaacatattttctacaacagattcactcgctaatcttccatacatatgattctcacggtcaattcgtaatgtgactagcaaatgatcaccaggttgtggccatagtgatttcacttttggtaaatcttcccatggtactaacacttcacggggtaatccaacatctatacgtgccccatcgcgatccgttttaagtactttagcaaagtcatatttatctttcgtaatatcaggcatattttgagttgcaaataattcacctgaacggtttggataaatgaagaaactatattcttcacctacttctaattcatcatcatcgttcatttctgattggtttaactttacgttttcaccgtttggtccttttaaaaggtaagttgagccttgtaaccctactacttcaaggaattctatagaacctactatatctttgtctaatgccatgttattctccttcgattcttgtattctttattattataacatgtgtgagtcattctatcattacaacttatatgaggtcgaaactgtgacgataatatgatataattcttccgttagaatatcgaatgaaaaaaaggagaaaatgcatgttacaagtaactgatgtgagtttacgttttggagatcgtaaactatttgaagatgtaaatattaaatttacagaaggtaattgttatggattaattggtgcgaatggtgcaggtaaatcaacattcttaaaaatattatctggtgaattagattctcaaacaggacatgtttcattaggtaaaaatgaacgtctagctgttttaaaacaggaccactatgcttatgaagatgaacgcgtgcttgatgttgtaattaaaggtcacgaacgtctttatgaggttatgaaagaaaaagatgaaatctatatgaagccagatttcagtgatgaagatggtatccgtgctgctgaacttgaaggtgaatttgcagaaatgaatggttggaatgctgaagctgatgctgctaaccttttatctggtttaggtatcgatccaactttacacgataaaaaaatggctgaattagaaaacaaccaaaaaattaaagtattattagcgcaaagtttattcggtgaaccagacgtactattactggatgagcctactaacggtctcgatattccagcaatcagttggttagaagatttcttaattaactttgataatactgttatcgtagtatcgcatgaccgtcatttcttaaataacgtatgtacacatatcgctgatttagactttggtaaaattaaagtttatgttggtaactatgatttttggtatcaatctagtcagttagctcaaaagatggctcaagaacaaaacaagaaaaaagaagaaaaaatgaaagagttacaggactttattgctcgtttctcagctaacgcttctaaatctaaacaagcaacaagtcgtaaaaaacaacttgagaaaattgaattagatgatattcaaccatcatcaagaagatatcctttcgttaaattcacgcctgagcgtgagattggtaatgacttattaatcgttcaaaatctttctaaaacgattgacggtgaaaaagtattagataacatttcattcacaatgaatccaaatgataaagcaattttaattggagatagtgaaatcgcgaaaacaacattacttaaaatattagctggtgaaatggaaccagacgaaggttcttataaatggggtgtaacaacatcattaagttacttccctaaagataactcagaattctttgagggcgttaatatgaaccttgtagattggttaagacaatatgcaccggaagatgaacaaacagaaacatttttacgtggtttcttaggtcgtatgttatttagtggtgaagaagttaagaaaaaagctagtgtgctttcaggtggagaaaaagtacgttgtatgctaagtaaaatgatgttatcaagtgcgaatgtacttttacttgacgaacctactaaccacttagacttagaaagtattactgctgtcaatgatggtcttaaatcatttaaaggttctatcatctttacttcttatgacttcgaatttatcaacacgattgcaaaccgtgttatcgatttaaataaacaaggcggcgtttcaaaagaaattccatatgaagaatacttgcaagaaatcggcgttttaaaataaacataatatgtagaatttcttttcgaaaatctctgtgttgaggcccgaccaacttgcacattattgtaagttggcttactgtcaccttctatattgggacttattccgcaacttgtattgtttgtagaaattaggaatccaatttctctatgtgtggcaccgacaaggattgaaaaaagctagctacaaagtcattttcattcagtcaactactgtcaatataacattgcagggcctagggcattgattcatgtccgagactatattcaatttaatagacattaactgggcgtctcgatgctaatatttatagcatcaaggtgtcctttttattttattttttagcacatcagcacagtgaacaccccttctctaaattacaaatacagttatcaccgcattaaaagagtacatttatttaatgtgcatattgagtatggagtatgctataagtattttgaattttatttttcaaaaagtctcattatcaccaccttttaaaatataagcaacgctataacttgaattttcaggttattccaaaaaatctaaattatcggtttacattcatatttgtcatatgtataatgaacacataccaatttaataatattttgatgaggcgcatcaatcatgagtaaagtttagattactgtctgctaacagctaaatttgaaagggtgcgatgccgaagcgattataatagcagttataatttgttggactttttggttaagagctgagagtttgtcattatttaaaaataatggagtgcatcacttgtatatagattaagagcaagttcgcattccgaacttgttctttttttattattgtgtgcccttcctaacaattaggaggattatatggtaacaagaagtgtgttgaaatatggcggatcatccgtcagtgattttacaaaaataaaaaggatcgctgaaatgttaaaggagcgggtcaatcaagatgaacaattaattgtcgttgtaagtgctatgggtaacacaacagatcaattaatgacgaatgtatcgaccttgactaaagcaccaaaacaacaagaactggcattattattgacaaccggagagcaacaaactgtatcttatttatcaatggtattaaatgatatcggtgtgaatgccaaagcaatgactggctatcaagcgggtattaaaaccattggccatcatttaaaaagtaaaattgctcaaattaatcctcaaacatttgaacaagcctttcaagaaaacgatattttagtagttgctggatttcaaggcatcaatgaacatcaggaattaacaactttaggcagaggcggttctgatacgaccgctgtggcacttgctgttagtaatcaaataccttgtgaaatttataccgacgttgatggtgtgtatgccactgacccaagacttttaccaaaagctaaacgactagacatcgtctcatatgaagaaatgatggaaatgagcgctttaggtgctggtgtacttgaaacaagaagtgttgaattagctaaaaactataatatccctttatatttaggaaaaactttatcgaacgtgaaaggaacatggattatgtcaaatgaagaaatattagagaaaaaagcagttgctggtgtggctttggataaacatatgatgcatgtaacaattagttatcccctacctgacaatcagctacttacccaactatttacggaacttgaagaaggtgctgtaaatgttgatatgatttcacaaatcgtcaacttggatggactacaactatccttcacgattaaagatagtgattttcatcaaatttctatgattcttgaaacattaaagaatcaatatgaagcattagcttataaaatcaatgagcattatgtcaaaatttcattaattggctcaggcatgcgtgatatgtcaggtgtggcatcaaaagcatttttgacattaattgaaaataatatacctttctaccaaacaacaacttctgaaataagtatttcatacgtcattgatgattttaatgggcaacaagcggtggaaaaactatatgacgcatttaacatttaatggtaaaatgattgttaaaatattctaaaaattggaaattattataaaatggagtgacaagttatgacaaaattagcagttgtgggttcaacaggattagtaggtacaaaaatgttggagacattaaatcgtaaagatattcctttcgatgaattagtattattttcatcagcacgttctgcagggaaagaagttgaatttcaaggaaaaacatatacagttcaagaattaactgatgctcgtgcaagtgaacatttcgattatgtattaatgagtgctggtggcggtacaagcgaacactttgccccactctttgaaaaagctggtgcaatcgttatagacaattcaagtcaatggcgtatggcagaagatattgatttaatcgttccggaagtcaatgaacctacttttacaagaggtatcattgccaatccaaactgctctacgattcagtctgttgtgccattaaaagtattgcaagatgcttatggtttaaaacgagtggcatatacaacatatcaagctgtatcaggttcagggatgaaaggtaagaaagatttagctgaaggtgtaaatggtaaagcaccagaagcatatccacatccaatttataataatgtgttaccgcatattgatgtgtttttagaaaacggatatacaaaagaagaacaaaaaatgattgatgagacgagaaaaattttaaatgcgccagacttaaaagtaacagcaacatgtgcacgtgtgcctgttcaagatagtcatagtgttgaaattgatgtaacgcttgaaaaagaagcgactgcagaagatattaaagcattatttgatcaagatgaccgcgttgttttagtagacaatccagagaacaatgaatatccaatggcaatcaattctactaataaagatgaagtgtttgttggccgtatacgtagagatgattcattagaaaatactttccatgtatggtgtacatcagacaatttattaaaaggtgctgcattaaatgctgtacaagtattggaacaagttatgcgtttaaaaggagcgaattaaaatgacacatttatttgagggtgttggcgttgcacttacaaccccttttacaaataacaaaattaatattgaagctttgaaaacacacgttaattttttactagaaaataatgcccaagcaatcatcgttaatggaactactgctgagagccctactttaacaacagatgaaaaagaacgcattctaaaaacagttattgatcttgtagataaacgtgttcctgtcatagcaggaactggcactaatgatactgaaaagtcaatccaagcttcaatccaagctaaagccttaggggctgatgcaattatgttaattacgccctactacaacaaaacgaatcaacgtggtttagtcaaacactttgaagcgattgcagatgctgtgaaattaccagtcgtgctgtacaatgttccttcaagaacgaacatgacaattgaaccagaaactgtagaaatattaagtcaacatccttatatagttgctttaaaagatgctacgaatgattttgagtatttagaagaagtgaaaaagcgaattgatacaaattcatttgcattatatagtggcaatgatgacaacgtcgttgaatactatcaacgtggcggtcaaggggttatctctgttattgccaatgtcattcctaaagaatttcaagcgttatacgatgctcaacaaagtggattagatattcaagatcaatttaaaccaatcggcacactgttatcagccctatcagttgatattaacccaattcctattaaagctttaacaagttatttaggatttggaaattatgaattacgtttaccattggttagcctagaagatacagatactaaagtgcttcgtgaagcatatgacacatttaaagcgggtgaaaatgagtgaaaatattactaattggctatggtgcaatgaatcaacgcgttgctagattagcagaagaaaaaggacatgaaatcgttggggtcattgaaaatacaccgaaagcaacaacgccatatcaacaatatcaacatattgcagatgttaaagatgccgatgttgcaatagatttttcaaatccaaatctgcttttccctttattagatgaagagtttcatttgccattagttgtggcaacaactggcgagaaagaaaaactacttaataagttagatgaattgagtcaaaatatacctgtatttttcagcgcgaacatgagttatggcgttcatgcactgactaaaattttagcagctgctgttcccctacttgatgaattcgacatcgaattaactgaggcacatcataataaaaaagtagatgcaccaagtggtacgttagaaaaattgtatgatgtgatcgtatctttgaaagaaaatgtaacacctgtgtatgatagacatgaattaaatgaaaaacgccagccacaagatattggtatacattctattcgtggaggtacgattgtcggtgaacatgaagttctatttgctggcactgatgaaacgattcaaatcacgcatcgtgcacaatcaaaagatatttttgcgaatggtgcaatacaagcagcagaacgcttagttaataaaccaaacggcttttatacgtttgacaacttataaacatattaaaggagattgattattttatggtacaacatttaacagctgaagaaattattcaatatataagtgatgctaaaaagtctacaccaataaaagtatatttaaatggtaattttgaaggcatcacatatccagaaagttttaaagtatttggttcagaacaatctaaagtaatcttttgtgaagcggatgattggaaacctttttacgaagcatatggtagtcaattcgaagatatagaaattgaaatggatcgtcgcaattctgccattccattaaaagacttaacaaatacgaatgcacgaattgaaccaggtgcgtttattagagaacaagccattattgaagatggtgctgtcgttatgatgggcgcaacaattaatattggcgcagtcgttggcgaaggtacaatgattgatatgaatgctactctcggtggtcgtgctacaactggtaaaaatgtacatgtaggggctggcgcagtattagcaggtgtgattgaaccccctagtgcatcaccggttataatcgaggatgatgtattaatcggtgcaaatgcagttattttagaaggtgtacgtgttggtaaaggtgctattgttgcagctggcgcgattgtgacacaagatgtaccagctggtgcagttgttgctggtacacctgcaaaagtgattaagcaagcttctgaagtacaagatactaaaaaagagattgtagcagcattaagaaaactgaatgactagtgacgtcaacgtataataatttcaaggttgagatacgattatgtctcaaccttattgtttatcattgaataaacttatgatcacaaatttcgaaatacgttacactatttatatagtaatttaacacaaaggattgataattatgaatgaattagaatttgttacgaaacatcgccgtcatttacatcaacatcctgaattaagcttacatgaatttgaaacaactgcttatattaaagcgtttttagatagtttaaatattaaatacgattgcccattggaaactggcgtcattgcatacttagaaggtaatggctcacatacgatagcgtatagagctgatattgatgccttacctattttagaggaaaatgatgtgccttatcgcagtcaatctgatcatgtgatgcatgcttgtggacatgatggtcatacaactgcattaatgctttttgtacaacgttgcaaagacatgcaagacgcaggtcaattaccgcaaaatgtcgttttcattttccaacctgcagaagaaactggtggcggtgcaaatcgattaataaaagccggtgcctttgataagtatccaattgaagcggtatttggtattcatgttaacccatttgctgatgaaggcattgcagtgataagagatgaagaaattacggccagcgcaacagagtatcgctttttcttaacaggcctgtcaagtcatgttgctgataaagaacaaggtcattcttgtggtgaagcattacaacatgtattaactcaaatatcacaaattcaacaatttcaccttaacggtttgaaacgaaatattgttcatattggtcattttaaagctggtgaagcgattaacactgtaccaagtaatggttatttagaaggtacaattcgtacatatgatattgatgatttaacaatcgttaaaaatcaaatgcacaagatagcagaaagtgtcaagcttctgtttaatgtagattgtgaagttaaatttgcagaaggttatccccctacaatcaatagtccgaaattacgtactcaaatagaggacgccttaataaaagctgatttaaatgtctatgacaaaccaacgccattcttatttggggaagattttagtttttatggtcaacaactagctccagcttactttgtttttataggaacacgaaatgaagataaaggttttgtaactggtttgcacacatcacatttaaattttgatgaaaaagtgttaataaacgtggttaatttttacgaaaatttattaaataattacaaagaggtgtaatacattgacagcaacatggtctgtaaataagaaaatatttttacaaaatgcaatcacagtcaaaaacaatcagccattaatggcagttgttaaaaataatgcatatcactatgacctagaatttgctgtaactcagtttatccatgcaggtatagatacatttagcacaacatcactacgagaagcaattcaaattagacaacttgttccagatgcaacaatctttttaatgaatgcagtttacgagtttgatttagtccgtgaacatcaaatacacatgactttgccgtcgttgacatattactataaccataaaaatgatttagcaggtattcatgttcacttagaatttgaaaatttattacatcggtctggatttaaagatttaaacgaaattaaagaagtattgaaagatcaccatcataatcaaaatgcaaaaatgattattagtggtttatggacccattttggatatgctgatgaattcgatgtgtcagattataatgttgaacgttcacaatggatggaaattgttgaagcacttttatctgaaggttatcagttcgacctaatccatgctcaaaatagtgcgagtttttatcgggaaggacaaatattactaccccaccatacacatgcacgtgtaggtattgcgttatacggttcaagaccatatagttcactgaatcaacatgatatagttcagtcattaactgtaaaagcacatgttattcaagtgcgcgaagtacaagctggtgattattgcggttatagctttgcctttgaagtgactaaaaacaatacaaaattagctgtagttgatatcggttatggcgatggaattttaagaacacgtgctaaacatgaagcacttatcaatggtaaacgctacccgatacgtgcattaatgatgagccatatgtttgttgaagtagatggcaatgtacatgcacaagatgaagttattctttataataatgatatccgcatcgatgaatatacctttaaaggtgttggtgcaaattctgaacaattaagtgctatgaatcatgattctttaaaaaaggagtacatttcaaatgactgttaaatataatcaaaatggcgaattaacaatggatggtattagtttaaaaacgattgcgcaaagctttggtacacctaccattgtttatgatgaactacaaattagagaacagatgcgccgttaccatcgcgcatttaaagatagtggattaaaatacaatatttcatacgcctcaaaggcatttacttgcattcaaatggtcaaacttgtagctgaggaagatttacagttagatgttgtttctgaaggtgaattatatacagctttagaagcaggttttgaaccgagtcgcatccatttccatggtaacaataaaacgaaacatgaaattaggtatgctttagaaaataatatcggttattttgttatagattcattagaagaaattgaattaatagaccgctatgctaatgatacggtgcaagttgtattacgagttaatccaggtgttgaagcacatacacacgaatttattcaaactgggcaagaagatagtaagtttggattatcaattcaatatggcttagctaaaaaagcaattgacaaagtccaacaatctaaacacttaaaattaaaaggtgtacattgtcatattggttcacagattgaaggtacagaagcatttattgaaactgctaaaattgttttacgttggcttaaagagcaaggcattcaagttgaattattaaaccttggtggtggctttggtattaaatatgttgaaggtgacgaaagtttccctatcgaaagtggtattaaagatattacagacgcaataaaatccgaaattaaagttctaggtatagatgcaccagaaataggtattgaaccgggacgatcaattgtaggtgaagctggcgttactttatatgaagttggaaccattaaagaaattccagagattaataaatatgtttcaatcgatggcggtatgagtgatcatatcagaactgcactttatgacgcaaagtatcaagcattgcttgttaatagaaatgaagaagcagatgacagtgtaactatagctggaaaattatgtgagtctggtgatatcattattaaagacgctaaattaccttcatcagtcaaacgtggagactatcttgctatattatcaactggtgcatatcattactctatggcatccaattacaatcaaatgcaaaagccttctgtgtttttcttaaaagatggcaaagcacgtgaagttataaagcgacaatcgttaagacaactcattattaatgatacaaaataaaaataaacaaagtaatccccgaagcacagaaaattatactgtgactcggggaatttttatgcattatagatgactgtagaaaacatgcttggacatatactctaaaaaaggaagaacagcacatttttagttagaaagtatttatttctttttgtcattaatcctttatatttagttagccctattcaactaatttaaagcatcatatacataccacactttaaacaagcatcatgaaattagattttatgctttacttgctttttcaaataatataaaacgataagaattaacaacaaatataatgtataaaacagaatttcatcaaatccaaaatctttacttgtaattaatacatcaatatcttctaattccatcatctctgctttaatataattattaaactttggcaaagtcattaaatgtacattgtaaatatagtaataaaagtcgataaatatgatgttaaaaaatatgtatgttttatcaatattagttttgaaaaataatatcccagaaatcattatcggaatcactaatacaatcatcattgctgctaaaatattaatatttaatccaattgcagataatacaccgaaaactaataaattagcaactaaactaaggataagatatttcataaaatcacctcgtcgttgtacaccataattatattatataaatataattttctattgcaaacaatgttggtgatataaaaaaagagttctcaatttggctgagaaactcatcgcgttaagtatttgtaataagcatataaaaacaccttacttcttggtaaggtgttagttaaaatcaatgattcaaatctaagaattatagtttaacaacgtttgcagcttgtggaccgcggtcgccttcaactacttcaaactcaacagcttgaccttcttctaatgatttgtaaccatcttggttaattgctgaaaaatgtacgaatacgtcattttctccttcaacttcgataaagccgaatcctttttcagcgttaaaccatttaactgtaccttgtttcataatctgaaacctccaagactaaaattcattcaatatgcttattcgcatattacaaaaaatacatgcaaatttcactcaaatattctttgcaatatggaataatcatctgcttaacttgtattatagtgcagttattaccaaattgcaatacaataataaaaaatattcatttaatcaattattggtagtttataatatacttcattattttgtaaaacaatgaaactataaaatatttgtaaatcctcttcacaatcttcgcaatagttcatgtcacaattattataaaatgcataaatattatatttgcctgtgacataattatcgaactgaactttacattgattaatcaattgttgatagtgcttaaacatgtcatcaaaatcttgatattgatatttttcaacaatgttttctggccagtcactgaataaccaccatccctcataatcggctctaattttggtaactgtccacattattaaagaccccttccatacttcaaaaactctatacttatttttatacctttatcctctgaaaatcaagtttgacgacttgaaacaaacaaagtagtaactatagtaattattagtttttttaagtaaaactacgtataataacattatgaggtggtaaaaatgagacatatacatttacaagtattcggacgcgttcaaggcgtcggatttagatattttacacaacgcattgcaatgaactataacattgtcggtactgttcaaaatgtagatgactatgtagagatatatgcacaaggggatgacgcagatatagagagatttattcaaggtgtaattgaaggtgcctcaccagcatcaaatgtaacaagccatcaacttgaagagttagaactaaatcaaaaattatcggattttcgatcaatataaaatgctaaataaaggaagatgacagtgagatataatatttctcatatatttggggtgttagtgggaattcctgtagcgtttttaacaagcatatttgggatgattgcacttgatgtatcttttttaattgatatgtctattggtattgttggctttttaatgacatacctaccgatacaaaaactcacttcacgcaaatatttaaacgaaattggtttgactagaaaagactatcgctatattcgaaatcagttaaatcatacacaccaaaaacttagaggtattttaaaaacgtatgtcaatataagatcaattaaagattttaggcagattaatgatatataccaaatttcacgttctatttatacgacagttagacagagacctgcatcattttataaagttgaaggctttttttattctcatattgataatgctttaaatttggttgatgcatatacacgtctagcaaaaatgcccaaaaaatcaattaatgaacagcaaaagttagaacaaacacgaattactttggatgaggtcaaacgaacattaatcgctgatttaaagcgtctcaacgaagatgattatgaacgtttagatattgaaatggaattaaataagttacatcaaaaacatcatcaagattgatgtaaaatagcaactattggagagatgattgatgactgaaaataaaagtttcaaagaaagccatccactagatgattttataagcgataaagaattatcgaatactactattcaaaaagaaaagttaacaattgaacaacaaaaacaggtagacacaatcagtaaacaaattaaccctttagacaatgaaggtttattagcgtttggttctgatttacagaaacaaatgtctcaattttcacatcaaatgttggatgaagtacaaagtaaagatgttggtcctattggagatactttgtcagatctaatatcaaaactaaagtcagttaatccaaatgagttaaatactgataaaccatctatgttaaaaagaatttttagcagagcaaagtcgtctatcaatgaaatcttttcaagaatgcaatcagttagtgctcaagtcgatcgcataacgattcaactgcagaaacatcaaacacatttaacaagagatattgaattattagatacgctatatgataaaaacaaacaatactttgatgacttatcattgcatatcattgctgcacagcaaaaaaagttgcaattagaaaatgaaaagctaccacaattgcaacagcaagcgcagcaatccactaatcaaatggatattcaacatgttgcagatatgcagcaatttatagatagactagataaacgcatatatgacttacagctttcaagacaaatagctttgcaaactgcgccacaaattcgtatgattcaaaatgttaatcaagcacttgccgagaagatacaaagttcaattttgacaagtattccactatggaaaaatcaaatggccattgcgcttacattaatgagacagcgtaatgcagttgctgcacaacgagctgtcactgatacaactaatgatttattaacagcaaatgctgaaatgttgaaacaaaatgcgattgaaactgcaacagaaaatgagcgtggcattgttgaccttgatacattgaaacgtacacagcgtaacattattgagacaattgaagaaacattaattattcaacaacacggtcgcgaagaacgacaattagctgaaaaagaattacaacaattagaacaagatttaaagtcacatttagtgaacatcaaaggaacgaataaacaatcataaattacgaattagatataacaaaaaagagcttgggacattaagttccttaaagttcttaggcaatgtaaaaaagctgatttctattatttatttgatagaaatcagcttttttgatatgtattttataatgtacagctcgttgagctgctattttccttatattaagtgccattaatacaaaacctagctctcgtttaactttatttattcctcgaactgacattcgagtgaaacccaaaatagccttcataaatccaaaaacaggctctacatcaatttttctttgactatagattttttcgtttctggttcagaaagcttttgattaatttgggctttaaagtattcccaattataattcttcataattttcttattggatttcgaatttggcttcatgcattgatgtctcaaagaacatgatgaacagtcatcacattcatatagcttgaagtcacgtttaaaactatatctatcattacggtatgcatatcttttaaaacctattcttttgttattaggacatataaattcatcgaattcgctatcagatatcgtttcaacaatttcattaacatatcgcgtattatcattttgaggaattctaacagaagtttctattggtagtgtaagttgggtcatgttataatttttatacataaggcacctcgttaatttagtttagtagtatttattaaattatacgaagggatccaacacagaaaatttattttattgaattttacatttatgtgcaagttgggcaaagtgtcttatttttttaaagtatttcaaagtaaaattacacgttaatacgtagtattaatggcgagactcctgagggagcagtgccagtcgaagaccgaggctgagacggcaccctaggaaagcgaagccattcaatacgaagtattgtataaatagagaacagcagtaagatattttctaattgaaaattatcttactgctgtttttttagggatttatgtcccaacctcttttatattattcgttattcctgttgatatttaattggatcttgttttacaaatatgccgactagatagcctaatatcgttgcaataattgctactgggaaccactctaaagaatacgctcttagaggcaatgattctataaagttaattttcagccaacctaacttactaataacactgaaaatcgacaatataaatacgataataactggaatttgttgtgaaatgcgttttgtcggtatgaatttggcaattaaaattaataatacaacagttattgctactgggtatacaatgcttaataccggaattgacattgagataacagcatttaaaccttggttagcaataataaaactcattaaaatgaaaactaatacaaatgctttgtatgatactttaggtacgattctatggaaatattcagaaactgcaacaataagcccgcatgctgtagttagacatgccagagccacaatgatgcccaataaatattttccgaatgaaccaaatcctgttgaagccattgtcgttaataaatatgtcccaatgtttcgatctttggatttcaattgatctaacgtcatgtcacttactggcatatgattaccaatataacctaatgaaatatatatgaaaattaaagctacggctgcaattaaaccagcagtcaaagtttgtttgaatatttgatttgttttagtaatgcctgttagttttactgcattaacaacaatcattgaaaaagcaattgctgcaatggcatccattgttaaatagccttgtgtaaagccttcagcaaaacttgaaaaattagaatgatatagtgcttcattgccctttccagcactattaccgctaaagtctaagtatcctttaataatcatcgctaaaatagtaatcaataataatggtgttaataatgaaccaatacgatcgattaacttagatggatttaaacaaatatacaaaacgactatgaagtagataatcgtaaatataaataaagcgatactactattgctatgtataattggtgtaattgtcatttcaaaagatgtagatgcagttctaggtattgcgaaaagtggtcctatagtcaaataaatgatgattaagaacaatattgaaaatttaggtgaaattttatttaatgcgccaatatatccttctttatcaagtgcacctacaatcacacctaataatggtaaaccaatcccagttagaacaaacgctaaaatggcgggccagaaaaattgaccactatccaatccgagattaggaggaaaaattagattgcctgcgccaaaaaacatagcgaagagcgtaaacccaatgacccatgtatttttattcatagagttactcctttttttaaaacacgaaataatttacaagtaaatattttagcacaaaaaataataaagagtctatatggaatgtgttgtacatagcagaaacaaaacacatgtgttgtttaaatcaaattatgccagaaaataaaattcttcaaatttactttttaaatagtaactgatgacttttattcacagtttcatataaactcatattttaaacttatttataaagatttaagtagtaatttttttaataatggagagagatgtccaggtaaatgcgcaacaccttcaacgaaaatagcatattgaccataaatattatgaattgtttgttcaacatcttcagttattggatcttgactcaaaaatacattaaatacttcaataccaaatttacgtgacatttctacagcttcatacgtatcaataataccatcttgactataattaaatgcagacggttcgccgtctgaaaatacgattaaaaatcgttgatgttgatttcgacgcattaatcgttcacttgcaactctaatagcaacaccatcacgattatcatcttgaggttcaagtgccataatacgtgggccatctttttcaaaggttgagtaatcatagttaataatttcattaatgatatttggttgtgcatgatcgtctgaatcaaaggcatcctcactgaatgataaaatttcatgtttaatgttcaatgcttttaacgtctcgtggaataacactacacctttcttcgtttcagccattttatcatgcatacttgctgacgcatcaattaacaatgtaaacgtcgcatcaaatgatttacttaaatcttgttttttgtaaaacaatttatattgatcgtcgataaaccaattaattaaatccttttgtaatcgtccttttgttaaattaaaacgtgcatctcgttgttctcgttcaatcgttttctttataatttgaattaagtctttgatttcatattgtacgtcttgtttcgattcttgatattctaaaacatattgtggctcaatttcaggaatttgccattttatttctacatttttgttcacaccatcaagttgaaatgcttggctttgaccaacagcatcgccttcttcacgatttagcgtatcgtttgaacctttgccctttttggtcatcatatcagtcatatcatctgtagcatcgccttcacgtgcttcatcattacccaatgtttcactattttgtccttcgtgaagttccatttctaaataggcgccaccttttgactcactatctgcagatttagagtcagctttttcactttcgttatcatcatcttctgaagtatcatcttgcccatcgacttgacttgcatcagttctctttaaatcatcaaactctggactagctaatgtattatatagtgttttaggtaagtaataatattcgtttagcatatcttcttttaaaatatcatctacttgatacataattctttgagccagatacatattatcttcagaattttgattttggaaaaaattaggtaaatataagaacatattaactacaatatcatctaaatctgaatgtatagatggtatatcaaagaaatcttggcttaaaaatgcatgttctaaatacaaaaataataaatctgtatattgtgttttagtacgatacactttaatttgagattccgtatatgatatacgtgtatctaagcgaagatcaattaatttagcagtacttgggcgctcaactttaatagaatttaatacgcgcatatcttctaataatttaaaaagttgttgataaaatttagggtgtttaaaagttttatcttgtactacttcatttacaatttgtacatccatcatatgataaccgtaagcagctaacataacatctgtttttaaaccagccatttcgatatggcttggtcgatgtgaccaaaaccaactcgtaatcaaaacattttgaacaggattatagtaagggaatttttggattttaacttgtgtttgttcattttttaataagagtcgagctaagtcttgcaacatcattacttgcttggcatctaactgttcgtcattaaattttatgaaacgatcactcatgttttatccctctttaaaagtttagttctacagcattatatattgcttgttgttcacgttcatcttccaatttatcaataattgtacgtttaattgcacgttcaactggcattacagtgattaaatcacacaagtctaataatgcacggatactagcggcttcttcagaaatttgtccctgcttagacatagtacgtaaatcttcattaaacttaataatttgttcgatttgtttatcatcttgtaataaactttgctctttaatcacattttttaaaatgtccccatcaatataatcaacgtgaataacaacaaagcgattttttagtgcttcattcattggcaaagtaccaacataaccttcatttatcgctgctataacgttaaatcctggtacagctttgattacttcaccagtgtatggattcgtaatttgacgacgataatctaagaccccatttaatacaggcaatgtttcaggtttagccatatttatttcatcaatatataaaatatgcccctctttcatagctttaataactggaccatctacaaagacaatttcttgttgaccttccgcatttgttttaattgttttaaagcctaataagctttctgtatctaaatcaacagaacaattgacttgatgcatgggtgtatcaacaacttcacttaatgtttctgccaactttgttttccctgaacctgttggacctttaagtaaaatatttttatttaaatcaaataatgccttcgcatcattgaaaactgttgaatctgaattcttataatgttttagtgccattttaaaacgttctcctttaaataaattaaaaaactaagacatggaataagttctccaaatgccttagtttactattctattctgatataaaacgcaatgcttagtatgcgaattgtttatattttaccaaatttactaattgaaaatctcatattaggcttcatttcaataattatgcgtttaaacttctttgaaatatgttttatagtaaccgccaactaatccagaattatctattatttgataatattcttcagtttcgttgataacatcatattgtttgccaaccgttaacatgtcagaaactgtaaatttctttgcatctgtattaatgacttctactttcttgattggtgtacgttctttccaagtttcatgtaacataaattttgtcctcgctatcgtaaaaaaattatttttgtaaagtgaatataaacgataatccactgttttcagtaattctaattgattcaatatcatcttgctcaagcgtttgatatggtatttccacttcatctaagcgcgatttcgcttgattaaagaaatctgcatctttcgtttcaaactcaacttgatcgactgcgccatattccggcattgtcatttcggtttctacaggcattaaatgtatttcgccacctagaccacccgttccaactttgaatacttggacatgatagtcagcattgtcgaagggttggtattctgcaaatacttcaagtccgaatatatttgttaaaatttgacctgtaatatctacatgattcactttaagaatcactggtcctaaaccttgcacttgatgtaacggattgaccgcactctcaaaagaaggcatacctaaaccaacgccataattattctcgtttgaatatattgagaaaatatgaccattgttatcttcgagactgaaatatttattgccatttaattctttaactgttgtaaatggaatatccttattcgataatatttccgcatactcctctaaacctgagtcagttggtgtacgtaatccaatacccacaaagtgagattcttctaattgctcacttggaacttgtataaattgaagtcttgttcctgggcttatatctgcatcgccgaaacgaattgagttttcaagaagttcttcataatttaatcctaatatgtcaaccatgaaatgttttgtctgttctatatttgttgtacctaatgttatacttctaagtccacacattatagccacctctatctttatctttactattatattataacttattttaatcataaattatagaatatcggtcagttgattttgattatagattaatatgtgaaaaatgtatttctttaaaagaactatttcatttaaataggtaacataatattgttatggttgctattgagtctgtcattaatgagtatctgtatctagcaattgaatatttcgttttttgtagtacataaaaaacatatatatgtcgtgttcataaagtgaatttacatcttgttcagatgattttaaattaactaaaggcgcttatagaattcataaatttcatcgcttgttattatctaaaatgatttcattagcatattgtaacacgctattctacctatatttctattgtgagtctatttcaatagaaatgatatattttttaagtaatcaaatttaaacccacattttaatacgaatcattataaaaataaagtacagcagtaagatatttcgactaggaaataatcttactgctgtttgttattgatttaatcccgcttttaggaatagtaaactattttgtgttgtggattaagattctaataataagtcttctgggttttcaattaattctttaattgtttttaagaatccaactgcttctttaccgtcaataattctatgatcatagcttaatgcaatatacatcattggacgattttcgattgtatcttgatcaatcgcaattggtcttgtaataattgaatgcatgcctaagattgcagcttgattaccattgataattggcgtactcatcattgatccaaaaataccgccatttgtaatcgtaaatgaaccattaaccatatcatctaagccaagttttttctctcgtgctttaactgctaaattagcaatttctgcttcgatttctgcaaaattctttttatcacaatctcttacaaatggtactaataatccatcatctgtagaaacagctacaccaatatcataatattgtttcgtaatcatgtcgtcgccgtcgatttctgcattaacttctggatactttttcaaagctgctacagaagctttagtaaagaatgacataaatcctaatttagtaccatcatgatctttcataaattgttctttcttacgtttacgcaattccataacatttgtcatgtcaacttcgttaaatgttgttaacatagctgtattattagatacctctaataattttttggcagctgttttctttctacgtgacattttttcacgaatcactggttttgtaggatattgattgtattttttctcttcttttgcagatgcttgttgtgttgtttgtgttgatgccggtgcctgttgtttcttatcaatatcttctttacgaaccacatcatttgttttcggacttacttcagcaagattcacaccattttcacgagcatatcgacgcgcagaaggcgtagcattaatacgttgctgattgtcatcatttgcttgatttacttcagctttatctaccgaattatttgttgtttcttcttttttattatttgtttcttcattttgttgtggagtattgtcgttactattttctttagaagcattgccactaccttcgccgatgatagcaattgcttgtccaacttctacagtgtcgccttcacttgcaagttgttcagataatacacctgcttcttcagatacaacttcgacattaactttatcagtttctaattcaagaatagcttcacctttttctacgctatcccctacgtttttcaaccattctgcaatggtaccttctgtaatagattctgctaattctggaactttaacctctggcatgacttatttccccctagttattttttaatgcattttctataattttattttgaacaagtttatgaatttctccatcgccttcagctggagcagccctttgaattctgccatgataacttaaatcatatttatctgcaactagcactttaacatatggatagacatataaccaggcaccttgatttttaggttcttcttgtacccatgacacttcttcaaggtttggcaattgtgctagtaatgcttcaatctcttcctctgggaatggatacaatctttcaatcgcaacgagtaatactgattcgtctggatttttagctaatgcttcttttaaatcaatgaacattttaccagttgccaaaataacttttgtaaccttatccgcttgatatgattctgtcaaaattggctcaaatccaccagaagtaaattcatcaattggttttgcaactgttttatttctcagtaagctttttggtgacataacaaccaatggtcgcatttgttcagaatctaaactagccgcttgtgcacgcaataagtggaaataattacttgaactagataagttgacaactgtgcaattattttcagcagctaattgtaaaaatcgctctaatcttgctgatgaatgttcaggcccttgaccctcatatgcatgaggtaagaataatgttaatcctgaacgttctccccattttgagcgagaactgaataagaagttgtcaaaaatcatttgtgacatatttgcaaaatcaccatattgtgcttcccaaatattgaagctttttttgttttccacattatagccgtattcaaaaccaactactgctgcttctgaaagcggagaattgtgtatatcaaatgtcgctttttgatcaggaacatgatgtaaaggtgtatatgtttcacctgtttgctcatcatgtaacacggcatgcctatgactgaatgtaccacgttcactatcttgaccagttaagcgaatcggtgtaccatcttgtaaaattgtcgcaaatgcaagttgttctgcttgtgcccaatcaactaaaccatcttctttattaaacggctcatgacgcttctcaagaactttgtttaactttttcaaaatgttaaagccatccggatatgttaacaatgcatcatttatttctttcaagtgatcaaaagtaaatgattgttcgtctgcttgtaacggtaatgcaagatctgcaggcttttccatatctggattatccattttatcagctttattaattttatcatgagcttgtcttagttccttttggacttgttctataaatgaatgcatttcatcttctgaaatgacaccttcattaacaagctttttaccaaacacatattcaacagagtcatgtttgcgaatattctgataaggaactggattagtaattgatggttcatccatttcgttatgtccgaaacgacgataacctactaaatcaataacgacgtctttatgaaactcttttctaaattccattgcaatatcaattgcttcaatagtagcttcaacgtcatctgcattgacatggaatattggcacatcataacctttggccacatctgtagaataagttgttgaacgtgcatcaattggttctgtagtaaatccaattctattgttagtaataatatgcaatgaaccacccgtagaatagcctttcaagtttcctaagttcattgtttcgaagttaattccttgaccaggataagcagcatcgccatgtataataattggcattgctttatgatgatcagtcgtcggagccccagctcgttgtgtatcatcttgtgctgctctcgtacgcccctcaacaacaggtgcaacaatttccaagtgacttggattgttagccagtgcaatacgctgcattgtaccgtatgaatcagtagttttaatgccaccaaggtgatatttcacatcaccagtccatccagcagttaactgcaagctaccatcttcaggtaagaatttcattggatctgtatgcataaattctgaaatcatcatttcgtacggtttttctaagacatgcgttaaaacgtttaaacgtccacggtgagccatgcctatttgtatatttttaataccttctttcgcagcaatcgtaatagtacgttgtaacatcggtacaagtgcgtctaccccttcaattgaaaaacgctttgcaccaacgaagtttttatgaagatatttttcaaacccttcaacatacgctaattgtttgaatagtgcccttttttcgttattatttaacgttactttatatggcgtttcaattcttctttttaaccaaccacgttcggtattgttattaatatgtgtatactcaaatgcaattggtcctttgtaacgtttttccattcttaaaattgcttcataagcattatcataaatgtcggcaaagtgatctgaaacaattcctgctgatataccttccaaagtctgttgatctaaatcaaagtcttcaatctctaatttaggtacatgtttcctttttggaggatttacaggataaatatcggctttaagatgcccgtattggcgaatattatcaattaaacgcatgacacgcttaattgtgccgtcgctattttgactacttgtactttttaaagctggtacaattgagtcatcattcttaattgtgctgaataagacttgtaaatcttctggtacagatgatggatcttgtaaaaagtcatcatatagatctaacattagacctaaattcgcaccgaagtttacaggagcctctgaaacttcttttctttcgttagtcattttacaccctccacaaaaatgttgaaacgcttacaatgtaataatatcactatttagttatttgttaaagtagatttacctatttatctgctaaaaagaagaatcaacaaaagcgttgattcttctaggtttatagatgtattttattgtaaattttgggagtacaacagaaatgataaagaaccactgtttatttgttttatagttgttcttatacattagtcacagctaatgtgtacttaaaaaattgatcctatgactttgattgacgtctcagtcatgattaaaatatgattttaaacgttgttcctttgttaatttcacttttaattttaatcgatcctccgtttaattgaatgattttttgagcaatagataatccgagtccattaccgccttgacttcttgaacgagatttatccactcgataaaagcgatcaaaaatgaaatcttgatcttcctctggaataccaattccatgatctgtaatttcaattattttttgcttattttttaaccttgtcttaactttaattttcttattcttcacatcatatttgattgcattatcaataaagattaaaaataattgttcgaattgatgaggtttcattttaatttctagatttttagatgtcagatccgtatcaaattgataatcaggatgcaattgttttaatgagtgtattcgcgagcgaatttcatcattaatatgcacggtctgtgcttcagaagaaatgtcatttacatctcctttagtcaattcaagtaattcttcgactaattttatgatacgattcatttcttcaatagaaatatttaacgattcttctaatactgctgggtctttttttccccatcgctgaatcaaatttaaatgaccttgaataatttgtaatggtgttcgtaattcatgtgacgcatcttcaacaaattgtctttgttgattaaatgattcttcaatttggctcatcatctcattaaacgtatttgctaaattatctatttcttcataatttgtatttaattgcaatttattttgaaaaccatctcgtcgaatctcaatcattttatttgataaactgacaagcggtttagtaatttgtgttgaaaatacataactgattgtggcagttataattgttgcaatcactccaaatgccagcgcaatgatatacaatgattttacgatgttatcataattttctagtgaatgaattaacaagctataccctttgaaatcttgcgttgtaattggttctttaataattaaatattcaatgcctttatagcgtttttttattacgcggtcaaaataacggtgttcataacctggttcaactctcactgtgttatcattcgatgtctcaaataatttattattatgctcatcataaataattatctcttgaaaattacctaaagatgcattcaagtctaatgcagatatatctttaacaggcttagaatgaaataaattattaatatcgcttgagcttcgttctgcatcatcaagctcactattatgcagtgtatctttcaagaaaaaaataataattaaacaaaacaaaaatatcgtgacaaacgtaatcatcgtggtaacaataatccagttattgcgcaatttacgttttgtcatcgtatcacatacccaacgccacgaactgtttcaatcattttgtcacgatcgtatggttttaatttgtttcgtaaatatcttatataaacatctacgacatttgtttctacttcactattataaccccatacatgatttaaaatttgttcccgttgcataacatggtttttattttcagcaagaagatatagtaaatcatactctgtttttgttaattcaatttctgcgccatttaccgtcactttaaaagcattcttatcaattgtaataccattgacatcgataatatctttttgtggctgacgacgtaaaatcgcacgtattcttgctaaaagttcttcaatatcaaatggcttaactatataatcgtctgcaccgtaatcaagcccagcaactttgtcatacgtatcacttttcgctgtaattataatgataggtgtagattgttgttgtctaattttgcgacaaatttctaagccattaattgacggcaacattaaatctaatatgattaaatcatagtaatggctaagcgctttatctaaaccgtcttgtccatcatactctgtgtccacattgtaattttcatgtgtgagttccaattcaagaaatcttgctaagttttgttcatcttctactattaaaatttgcgtcatttgtacacctcatattacgactttttctaataaggtaatatattttaaattttgtatttttctatacaatagttgctttttaaattagtttgtttacgtttaaattttatcacaaatcaataaccatgttttaaatttttcaagctacaatcattaattatttattaactcaaatatttaataatcagttaatggaattctgttaattctgattgcagtacttaaatatagaatactgtaacacaaggccttaccgcaatatcaattgttgtcgtatacttacttttcactaatgtaaaatgaatagttattatctttattttcacaaaatgaccgtagtttaaacattttcacacatcatttcaatgtgcgattttgaacttggaagtaacatttcataatgtataaattcaaaaggagtatgtaaacaatataatttttaaacctcataacttttaaatattctaattctaatgagaaatacaaatttttttattttctaaaatagcgtaatcatgcgttttatttactattcttaaaaaatattcaaaaaaagttttaatttctaattgacaatgattctcactaatgtataatagtagttgaaaatgattatcaataccacatagaacatccccccacaacgtttcgttcttgttggattggtcattttcaaatattccccttttatatgcccgtaaaagacaatatacgttataacaacgttttataaaagcagtaaacccttacgacactttaggtttactgcttttgtttttttactatttaatttattaatttatttctaagtaataacgttgataaaataatgcaaaatacgccaccaataatgccggcaataatatctgttggataatgtacacctagatatacacgtgatatggaaatcaataaaatcatagctgcacataaccctataagaataccttttgaattaccttgatttaatcgatttaatagatagataccacttccaaaatatgcagttgatcccatagcatgaccgctaggaaaactaaatcctgttatatcaattaaacgcagcaatgtaggtctttctctatcgaatatattttttaatgctggattcaaaattccagataatgccattgttaatgcaaaaaataatgcttcaattttgtggcgctttaacatgagatatgccacaagaagtaatgaaatacataacattgcccagacttcacctactttagtagccccaagcatgatagatgtcgttatgaagctctctgatgaatatataaattcataaacttcattatcaatccatttccctagtcttgattcgtggaaaaacgcgataattccaaaaaccaatgtaaaaacgatgagcaaagagatacgtttccattgactcataaagcattaccccccattaattcaatgcatctttaatcatcttatcaaataaagcttctttcgtataactttgttcatacgatttcatattattgataattcgagttctttcctgttccatttcatttagttcttgtaataaaatttgtgctgttaattgttcttcatcaatcgctttagcataacctttatcagcaaaatgatttgcattgtcaatttggtcgcctcgggattgatctaaacctaatggtactaataacattggtatacgtaatgttaagaactcataaatcgcatttgatcctgctctacttattactgtgtccgtaattgctaataaatctgttaaatcctctttaacaaattcatattgtatatatcctgattttttaacttgagcatcttttaatcctttaccagttaaatgtatcacttgatattgttgtaataatgcatctaagttttcgcgaataatgctatttaattttttacttcctaagcttccacccataacgagtaaaacttttttattttcattaaagcctgttaattgataaccattatgtgcattaccattttttaaatcttctcgaattgttgctccaataaaatcagctttctctttaggtaagtagtttagcgtttcttcaaatgttgtatatattttcttggcaaatttaagtgctatcttattcgctaatcctggtgttaagtcagattcatgaataatagttggtatatttaatgatttggctgcaataacaacaggcacagatacaaatccaccttttgaaaataatagatcaggtttttcttttttcaaaactttacgagcatcaagaatacctttcaatactttaaatacgtctttggcattttctaaagaaatatatcttcttaatttaccactcgaaataggataatacttaatttctggtagttgtgattcaatcatttctctttcaataccatttttagaaccaatataaagcgcttcataaccttgtgataatgcagttggaattaaacttaaatttactgatacgtgtccaactgttccccctccggtaaatgcgattttcgtcattaatattacctctattcttttaaatttttataatatgcataaaatggttcacctttatcatatggcggatattccattaattgttcaccgaccttatgaaatccaaatttcgcaaataaaccttgtgcaggtttgtttaacgcaaaggtgtccgttaaaataacttctgcaccacgtgctttaactacatcaataacataattgaataattctgtagcagctcctttatattctttcgaaccagttaatcgatgaataacaaaggcgccttctctatttactggccagtcaatgtcatcataccattctgcttggtcttggtcgacaacaataaagccataaattttgtcattttcctctaatacgtacaaataatctttagcaatatcttcttcaaaatgttctaaaagagggtactgatcgtcccattgctcgttgtcgtgttctttcattaattcttttgcttcttctactagatttaagatttgatctaaatctgacattttacctagacggatcatgtacgtcactccttatatcgttatgttaaacatgtttttcagtacatgttaatcttacacactattaacatgctttaaacctttattatgaatgaaaaatagtaattatcacactatgggataaaaataaccaataaaagtatcatataccaattaattgattgttaaaactagtgaataatactatttaaaaagtttatgctcatagtatattaaaccatgaattattaacagcaatgatagaaattgcgttatttacatcatttataaatgtctaatttatatcttttagagttagacgtcaataaaaataaacacgccgaggctgggacatacatccctaaaaaaagcagtaagataattttcaattagaaaatatcttactgctgttctctatttatacaatacttcgtattgaatggcttcgctttcctagggtgccgtctcagcctcggtcttcgactggcactgctccctcaggagtctcgccattaatactacgtattaacatgtaattttacttttaaatactttaaaaaaaataagacactttgcccaacttacactaccaatagaaacttctgttagaattcctcaaaatgatatttcacgatatgttaatgaaattgttgaaacgatacctgatagcgaattcgatgaattcagacatcatcgtggcgcaacatcctatcatccaaaaatgatgttaaaaattatcttatatgcatacactcaatctgtattttctggtcgtagaatagagaaattacttcatgacagtattcgaatgatgtggttagctcaaaatcaaacaccttcttataaaactattaatcgttttagagtaaatcctaatactgatgcattaattgaatctttatttatccagtttcatagtcaatgtttaaagcaaaatcttattgatcataattcaatttttattgatggtacaaaagtagaagctaatgccaataggtatacatttgtgtggaagaaaagtattccaaatcacgaatcgaaattgaacgaaaattcaaaaacactatatcgtgacttagttgaagaaaagctgatttctatcaaataattaatagaaatcagcttttttacattgcctaagaacttaatgttccagcctgagcgtgtcattaacataataataatacaattttagcagtgtgtatctcttattttaaaatattaatcaatttatcgagaacatcatcatgtttattagctttttcaactaataactcagtaaatttattattcgtttctttattaaattcaccagttacctcgagtttattcgcttgttggaaagctttaacttgattttctaaagcttgatcaaattgcgttgtttcattatcaactttataacctaaagctgacaaaccaattttaatagttttaatatttttatcatcgtctccaactttaaatgttttcgtattaggaatgacatttaaagattgatatttaggtgtgtcaatagtaacgtctggtttaatgcctttaccgtgaatataatgaccatctggcgttaaccatttcatttcagtatattttaacaatgaaccatccttaaactctcttgtagtttgtacgacacctttgccgaatgtttttgacccataaactttagctttattatagtcttttagcgcaccagtaaacacttcagaagcgctagctgaaccttcattcactaagatggatatatccatgtctttcgcttcttttaacgcatcattagaagtttgaattgcttcagtatctttacctttttctagtttaacaacagtttttcctttatcgataaaaatatttgccattttaacagcttcatctagtagtccacctggattatttcttaaatctaaaacaatctttttcaaaccatctttgtgagcttttagaactgcatctttcaattcacctgatgtatcattctggaatttattaatagtaataactccaactttaccttttttcttatactcaacacttttaacatgaattttttcacgtttaatcttaacgtctttttcttcactacctcgttgaacagttaaagtgacttcagtgttttctttaccacgaacatctttgacaacttcatctaatgcttttcctttaattgattttccatttactttagtaatgacatctttaggacgaatgccagcacgttctgctggagatcccttcataggactagtaaccataatttgatcatttttcttttgcatttctgcaccaatacctacaaaatcacctgaaacaccttcattaaaggatttcgtttgttcttttgttaaatattcagaataaggatcttttaattctttgaccatgccatcaattgcagctttacttaacttgtcagagtcctgttttttgtaataatcactatttaagattttatacacattttcaattttatttaagtttgcttgatcagttttgtttaaaccacttattttttgatttataaaaatatatgcaacaactgtgatgacagctgttattaggattgtaccaattaatattgatatgaattgccaacgttttaagtgaacgcgtttcgatgaattagtttcttggtcttgattgcttgttgcaatttcagcgcgttcatcatcggatgaagatgtgtgttgcttatcatccattgtatcacttccttattatgtattatgtacttttaaattctgtgtagttaatcatatcaatttatgcaagatagcgcaccatatttcactataattgattaatttttagtcacaacttagtttattttaaattaaaaccaggataacgaattgcatcaccctggttctaactattattattaaaaattatattaaaattttagccattccgtatattcttcatataaatcatcaaatacagacattggcaatgtgaaatcaccatgtgtctcaatataatcagacagtatgttaaaatcatcatcgtgttttgggaaagcaagatcgtcaaatatctcttctgctagacgacctttatcgtcgtgtcgaccacgaactgtcatgacaaattgataaaacgaatagtttttcattagttcattgtcacatcaatcacttttgtttcacctttaatcacagcattttcatcataaatattaattgaagctgcttgatcagtgttagtaattataattggtgaaattacagatttagcgttattattaatatattcaaggttgaatcttactaatggatctccgacgttaacttcgtcaccactagacactaacacttcaaatccttcaccgtctaattgaactgtgtctaaaccgatatgaactaataattctaatccgttatctgcttttaacccaatcgcatgcttagttggaaagacattgtcaacacgtcctgcaattggagacacaacttctccttcagttggattaataccaaaaccttcgcccatcattttttgtgcgaatacaggatctggaatatcttcaattttcacgaattctccagttaatggtgtataaattgcgatatctttctgaacttctttgccttttccgaataattttttaaacatactttccactcctacttatcaaaatgtgatattaaatcgccataacccaattcttctaacttttcatatggaataaattgaattgcagcggaattgatacagtatcttaagccgccactttctttaggtccatcattaaagacatgtcctaaatgactatttgattcttctgaacgcacttcagttctcaacataccaaatgatttgtcgactaattctataatttcatcgtcatcaagcgctttggaaaagctaggccatccacattcagaatgaaacttttcttcagatgtaaataaaggtttaccagaaattttatctacataaattcctttagcaaaatgattccaatattcattcataaatggtggttcagtgccgttttcttgtgtaacaatatattctatatctgttagttcacttttatcttttttaagcattttgattcccccaatgtgattctataaacgcttttctacctgaaccacgttgatattggtaataatgtaccgggttctttttgtaataatcttgatggtagtcttcagctggatagaaatttttatatggtttaataggtgtaatcactggtttcttgaaaataccttgttcatttaattgttgctttttaaactcagcagcctttttctgatgttcatcatgatagaaaatgactggttgatagctttcgcctctatcgaaaaattgcccttgatcatcagttgggtcaaatgttttgaaatatatgtctaatatattttcaaaggaagtaacctctggatcaaacgtaatttgtactgcttcgacatggccggtttgattcgtacatacctgttcataagttgggttgtcaacatgaccgccactataaccagatacgactgacttgatgcctggatatgatgtaaatggtttaaccatgcaccagaaacatcctcctgctaatgttgcatattcttttgtcatatgaattacctcctctatctatctaattataaatttagtctataaaggattgaaatggaagtaattaacactgaaaagattaaatttacttcttaaggactacgaggccaatcgcaccttgaccagtatgtgcagaaataactggtgtagttacatttatatcgtaattattcacatgaaaagcttcattaaaaactttcttcaatttatcaacatattcaatgacgttagcatgtgcgacaccaatggatttgatttcatgatctcctataaattcagcaatttcctttttcaagtattggatactagaattttgagttctcgcattgtgcacaagctctaagcgaccatcatctagtgtaccaattggtttaattttcataagattaccaatcaaaccttttgttttactaattctgccacctttaattaattgattcaattgccctataactacaaataatttaatgttttctcttaaatgatttaactttttaactatttcagaagttgagacaccttcttttacaagctctactaggtgttgtatttgataccctaaaccaaaagaaatagattttgaatcaataacagttacattagcatctaccatttgacttgcttggtaagcagtgttatatgtaccacttaatcctgaagaaagatgaatacttatgatttcagagccatcttttcctagttcttcataagcagatataaattcacctatggctggctgacttgtctttacatcttcatcattttcaatatgattaataaattcttctgatgtaatatctacttggtcaacatatgaagctccttcaatagttaaacttaaaggaattacatgaatgttgtttgcttctaagtattctttagataaatcggatgttgagtctgttactataatctgttttgtcatggtcgttttcccccttattttttacgaattaaatgtagaaaggtatgtggaattgtatttttctcatctagtttaccttcaactgaagaggcaacttcccagtcttcaaatgtataaggtggaaagaacgtatcaccacggaatttaccttcaataacagtaatatacatgtcgtccactttatcaatcatttcttcaaataatatttgccctccaaatatgaaaacatggcccggtagttggtaaatatcttcaatagagtgaattacatcaacgcccactacgttgaaacttgtatctgaagtaagtacaacatttcgacgattcggtagtggtttaccaatcgattcaaatgtcttacgacccattactaaagtatgacctgttgataattttttaacatgtttcaaatcatttggtaggtgccaaggtaattgattttcaaaaccaattactcgttgcaagtcatgtgcaactagaatggataaagtcataattatcctccttcttctatcatttcattttttattactaagttatctttaatttaacacaatttttatcataaagtgtgatagaaataatgattttgcataatttatgaaaacgtttaacacaaaaaagtacttttttgcacttgaaaatactatgatgtcattttgatgtctatatggttagctaactatgcaatgactacactgctattggagcttttattgctggatgtgattcatagtcaacaatttccaaatcttcataatttatgtcgaaaatagacttgtcactgttaatttttaatgttggaggattgaagctttcacgtgctaattgtgtttgaatcgcatcaatatgatttgaataaatatgtgcatctccaaatgtatgcacaaattctcctacttcaagtccacattctttggcaataaggtgtgtcaataaagcgtagcttgcgatattaaatggcacacctaaaaagatatctgcgctacgttggtataactggcaacttaacttaccatcttggacataaaactggaacatggtatgacaaggcggaagtgccattgtatcaatttctgttggattccatgcagatacgatgtgtcgtcttgaatctggattatgcttaatttgttcaattactgttttaagttgatcaaaatgattaccatctttatcaacccaatctcgccattgtttaccataaacatttcctaaatcaccgaattgcttcgcaaaagtatcatcttcaagaatacgttgcttaaattgtttcatttgttctttatattgttcgttaaattcaggatcactcaatgcacgatgcccgaaatctgtcatatctggaccgttatactcgtctgattttatataattttcaaaagcccattcgttccaaatattattattatattttaataagtattggatgtttgtatctcctttaatgaaccataataattcggttgctactaatttaaaagaaactttctttgtcgttaatagtggaaatcctttagataagtcaaagcgaagttgatgaccaaatttcgaaatcgtacctgtatttgtgcgatcatttcgtgtatttcctatttctaaaacttcttcacaaagactgtgatatgctgcatcaaatgaattcaacatatgcgataacacctcattttcattatttatagtatgtatatttagtttgatataacttaattttatgtagcattttgttatcactcattttaggaatatgatattgatatcatgaattccgttactttatttataaaatgctgattaagtacctaccacatcgtaacgtgatatatgtttccaattggtaattgtttacccaaatctataactttaatgctaaaaaatttaaaaaaagaggttaacacatgatttgaatattatgtttgatgtcctattaaaacagttaaatttctagaaaatatagttggtaaaaacggactttatttaacaaatagaatacaactatattctctattttcaatgacagacaccatttttaatattataaaatgtgttaacctttatatttatttatgtgtactatttacaattttcgtcaaaggcatcctttaagtccattgcaatgtcattaatatctctaccttcgataaattctctaggcataaaataaactaaatcttgacctttgaataaagcatacgaaggactagatggtgcttgctgaatgaattctcgcattgtagcagttgcttctttatcttgcccagcaaaaactgtaactgtatttgtaggtctatgttcattttgtgttgcaactgctactgcagctggtcttgctaatccagctgcacagccgcatgtagagttaataactacaaaagtagtgtcatcagcatttacttggttcatatactccgatactgcttcgctcgtttctaaacttgtaaaaccattttgagttaattcgccacgcatttgttgcgcaatttctttcatataagcatcatatgcattcatatttaattcctccaattaaattgttctgtttgccatttgtttccatactgaaccaagtgcctcatctccgttttcaatacgagatatggccatttcaatttgtaatttaacttcaaacgcattgtcattaatatgggcttttagtgcgggaagctgctctgcattaccttcatcaaagataaacatagcagcacgccacctaacgattttctgtggatcatctaatagtagcaccatttctggtagtgcctctggataccctaaatcgcttatgcaatcccctgctgttcttcttacagcaggacttttatcacgaagccccttatataaatacggtaaaatttctttactttcaatcatacctaataatacaatcgcttgacgtctaaccggtactttttcatcagataaagctaaatcaagtagcggtatatcttcaaaagtcggctttggaaaatggtttaacattcgtaatcgagtcttccaattatcagttgcatgatattcatccaaagagacatgtcgatagaaatgataattattagttgcgtgattttcttctaaagcatgttttaccaatacgggtaactgtgattctggataggtagctagcacttcttctaggacaccatccattacttcttcaatatttccatagcgatttcctaaatctagccatttacgcataaaaacaatattgtcatgtgctgtttgcgcttgagtcatatgatcaacatatgtttgtggtaattgttctcttaattcttggtcagcagaagttagcttaatttgatacggtatacccttaaaagttaataattcagctttaatttcaccaaaatgattgtcaatttgaggttcatttacagattctaaaaccttattcgcatcagaaaaagcagctttaatatcaggtaatatgacttcccaatcagcttttggtgccttatcaacagctaagaagttcatgacatgaaaaatggaagtgataccatctatagataacaactgatttataaatcttggttgtgtttcttctacttttttataagtattagataacttgtcttctcttgtatatgacaaaacaactttcattgtatttggacttggtgttggctctatacgtaaaatttccatatactttattcccccccgaatactagttgatgaaaaatttattcgaatacagcctctacttttggcaatactgtttcccaatttgcgtcattttctttatctactgaaataaagtccataacatggaaaattgatttaacgccttcaacctttaagatgtcattaataaatgctggctgtgaatcatcaactttagtatacgtatctgatgtcataccttctctgctttcactaagtgtaatcttcattgtgttgtggttcggtgtttctgatatagatataattttcatttgacttcctcctattgaagttcatttcctaattgttttatttctttccctattgaacactcattgatacaaaaatgatgcgccttcgttttcccctctaatttacgcagacgagttttgattggacattgattgcaataagtattcattaaatcatctattttcgcgagtgcattttgctctgaaaaagttaaaatacgcgacacttcctttattacttcaaaatattgcaaccttgtaaataagtgttactgttttaaatttgacataaaaatattataacatttttgaccctaagatttgaataaaaccttttacaattctatacgtaaaatgtatttatattcaaatgctattgcatcgcaaacgatttttcagtaaaatgagtaagttatttattgagcggtttctaaacacccgcatgatcaaaatttaggaggacattttaatatgtataatgaaattttaggactagttacgtttattgcaacgttcgtacttatggtacttatgtatcgcttttttggtaaacaaggtttaattgcatgggttgcaattggcacaatcattgccaacatacaagtgattaaaactgtagaaatctttggtatttcagcaactttaggtaatgtcatgtttgcttctatttatttagcaacagatattttaaatgatatttatgggcgtagagttgcaaaaagagcagtttggttaggcttttcatcaacattaattatgattattgttatgcaattgtcattacattttattcctgcaccagaagatatggcacaaaaagcattacacgcaatctttgatgttgtgccacgtattgctttaggctcaattgtcgcatatattattggtcaacatattgatgtatttatcttttcactaattaaaaaagtatttagttctgataaaacgtttttcatccgtgcatatggtagtacatttttaagctcaataattgatacagctttatttgtagctatcgcatttatcggaagtttacctggtacagttgtatttgaaatatttattacaacgtacgtattaaaattagcttcaacagttttcaatgtaccatttggatatattgctaaatcattttatcgtaaaggtaagattgataagttagatcaaggctattaacgcacttactacacaaaagaataagttttaaggctgtgggacagaaatgatattttcgcaaaatttatttcgtcgtcccaccccaacttgcattgtctgtagaaattgggaatccaatttctctttgttggggcccatccccaacttgcacattattgtaagctgacttttcgtcatcttctgtgttggggcccacaccccaactcgcattgcctgtagaatttcttttcgaaattctctgtgttggggcccctgactagaattgaaaaaagcttgttacaagcgcatttttgttcagtcaactactgccaatataacatcgtagagcatagaacattgatttatgtcccagcctgaagatgattttttaggaagtatattacagtactacgtattagaaaatcatctttgaatcagcgagtattttaaacacgtgttacttatttaagtgatgcgtgttttttaatggattacccaacatattttgtattacagtaatagtaactttaactaagtattgaatagaaagtaggtttattatggcgaaaataaattttgatgctgcgacgaaaggaaatccaggcataagtacatgtgccattgtaatcaaagaagatgagcagcattatacatatacacatgagttaggcgaaatggataaccacactgcagaatgggctgcatgtatttatgcactagaacatgcacgtgaattaaatgttcaaaacgcactattatatacagactcaaagataattgcagatagcattgaagctggttatgtgaaaaacgcaaatttcaaaccttattttgatcaaatagaaatatttgaaaaagattttgatttattatttgttaaatggataccgagagaacaaaacaaagaagcgaatcaacacgctcaacaggcattgtataaattaattaaaaagaataaataaaaggagcaccgactgatgtgatgtcaatcggtgctcctctatttatcaaagaaacaaattattttttatttttcttagatttctttttcttctttttggctgctacctttttagaagtattttttgatgctgactttttgtctttggattggttatctttttgatttttctttttagccaataataaaggaacgtcctcatctttagattcaatactagttgttgtttcaacatcttcctctttatctttgcgtcgttttgcgaataagagtggtgaatgttcgttatctttcaacactttttcatctgtgttttcatttgtaacttccacatcttcttcatcttctttacgacgacgttttggtaagaagaaaggcgtatgtttaactttatcgagtgactcgccattatttagcgaatctttttcttcaacagtaacatcttcttcatcttcttttctgcgacgtttcgcaaataaaagtggtaaatgttttgtatcgtctaaagtctcttttattgaatctttattattatctcttatttctaattcttcctcttcatcttctttacgacgacgtttggcaatgaagaaccagaaactagctagtaagccagagatacccaccacaccaatagcgtttttaataacattaccgaaattattactaaagtgacgcatatgaagtggatcaatgtcatcatcttcatcaattttctttttatgtccaatagtcgaactgttaaatggatgatttgcagttccataaccaattgttaaatggctattagattcatttccagtacttgaagattgtttagcacgatcagatattacaatttgtactgctgaaattcgagcaataccattgttcaatgcagcctcaacttgctgtaatgtatgcgcattattaatatctctaattgtttcaagcacaatttcgttaatttgattcattgctgcttgtttttcatcagctgtgccaatttcactatttcgaatactattcattttttcatttgaaaagtctttaattctactaatagcttcttgcttgcgtttagctagttcttttgctgttggattagctgctttcatttgagctttaaattgttccaattgctcagttatttcatcgatgctttgcgcacgttgaatcgcttgaattgcttgttcttttaattgatttaacttagcaatagcttcttgcttctctttatctgttagatcagtacgagctttgatttcatcaatcatatgttgaattgcatcttcaatcgatttaattgcatttgattttgcttgttcaatcgtaaattgttctggattaaattgttcaatatgcgcttgttcttgttgttgaatttcttcaactgaatgaacatcaggtgcattgttaatatgatcaattgcttgttgtttaagcttattaacttctgcaattgcagcttctttttgttccagtgttaatgtcacactattattgatttcattaatcttttgttgtgccgcattttcgattgattcaattgcctgttgtttgactactgacaattctttttctacaacttttacaggaacattaacaatcacttttgatccatcaagcaatgtaacttcaacttttgctgttaagctatcagaaatcgttgcagttgatggtgtatcaataacttctgctgaaagctgatcaattaagtttatgtgtgcaagaatatcttgttctgtaatgatgtcatcacgatgtacaatgagttcaccattaactaggatttgctcaggtgttgcttcaaaaatttcatttacagcaggttgttcatcaacctcccatacatgtgtatttctaatgtcatctaaacctaagtttaatcctcgatttaattgatctatagtttgagcattctcaacgttttgtagtgctcgtttttcagcttcgtcaatttctttgagcgcttttgctttttgctcaggtgttaaatctggatttgaattgatttgatcacgcttcgcattagctaaggcttttattgcatttttcgcatcttctttagctttcactaaatctttgatgtcttgtaatgcttgtgcaagttgtgctttggcttgttcaatttcttctttagtcatcgcattgttaatgtcgttatgaccttgttgaagtatttggttaattcgatctttaagtgcttgtttttccttatctgttagatttggattttgatcgatttcgtcaattaaagcttgaacttgcttgtcaacatcttgtttcgcattttctttagctttcactaaatctttaatttcttgtaatgcttgcgcaagttgtgctttggcttgttcaatttcttctttagtcagcgcattgttaatgtcgttatgaccttgttgaagtatttgattaatacgatctttaagtgcttgtttttccttatctgttagatttggatttcgatcaatttcgtcaattaatgcttgaacttgcttgtcaacatctttattcgcatcaattttagctttcggtatttcattggcatgcacttgttcaatcgcatggttgccagctgtttgaacttgagatacatcctgattacttgttgctttattaatgttgttgatgatgctgtttgccaattcttctgctttatttttcgcaataagcttgtcttgatccgtcgcatttgaagcttcgatttcttttagcttattagctaaagcttgattaatagattgaattgccttgtctttagcatcttgtagtcgttgatcaccattaagattatggattgcatcattgactgcttggattgcgccattgatatcattcacatttgtgttatcactatttagcaatgcatttgctagacgtttggcatcatcgaagtttgttttagcattatcgtcagcgttttggtaattgacagtttgctctgcatttggaatttcattgtcaactaaatgtttcaatgtttccattgcatcatttaagtcaatttgattattaacaatatctgttacatctgatacagtatcggcattgttaattgctttatgtgcaagatcttgttgctgttgatttaatccatttaacgaattaacaaacgcatttgctttatctttggcatttgcaaggttttggtctccatttaatgcattttgagcatcgataatattttgtttcaattgctctgcttcagcttttgcaattgcattaccttgcactttatctaactcatgtgctgcattcgcaattgcattatcataatttgctttcaaattgtcatctgcattgatgtaatttgtgctgctgataacaccaaggtgctgttcgtcaatatattgttgtactgcacccattgcattatctaatttagttgctctattaattgctcgagatgctttatttagcgtttcagcattattaatttgttggattgctaattgtctttgagcattgtttagatgtgttaattgatccaatctttgtaatgcttcagacttacgattattaagtctttcttcaccatttaatgcctgtttcgctgccgttactgcatcatttaatttgataacttgttctgcagttaagttttgaccagtcgatttatcaagtgcttgtttcgctttatcaaccgcttcatcatatacttgtttgacttgtgtatctgcattgacatagttcgtgctacctttcgtgcgtccttcattgccagtgatttcttctgacaattgatccattgcacgattaagtgccttagcctcatctacaatttgttggatttgatttaaatcgtttgattgatcgatgcgacctttaaatccatcttgttgagcattgtttaatgcattcaattggtcgatgtcatgtttaccatttgttttagcaagtgctacacgttcatcaccatttaatgcttgttttgcatttaaaatattttgaagtgcttgatccacttgttgcttattcgcattttgtttcaatacattttcagcatcagcaatcgcttgtttataagccttttgcttatctgaatctgcttgcgtgtaatcaactgtttgctcaacatttgtatgatcattaacagcttgttgtaattgatccattgattggttcaattgcgttgcttgatctactaattcagcgattggttgaagttgcgtcgcttgatcaatgttttgtttagcagttgcgatttgatcagcatttaaatgtgttaattggtcaatattttgtttcgcttgtgttttagcttcagcgactctctcatcaccatttaactcatttactttttcttgaagcttagttaatgcttgttctacagcgtctttattcgcatttgaaccattagttggatctgtaatgctttctgcagcttgtaacgcttggtctactgcttcttttttatcagttgacgcttcagtgtaatttggttgagccttatctgtatttacttgatcaactttatttttcaatgtttccatcgcgtgatcaagttcagtagcagtttgaacatgttgtgcaacctctgttcttgtaggcgctgcatttatagcatcagttaatgcttgttgttgtgcatgatttatgtttggcaatgcatttacagttgttactgcttgttgttgatcacgagcaagtttttgatcaccatgtaggttatcttttgcagttgttactgcttgtgtcaattgttcaacttgtgctttatcaagcgttggattacctgtttggttaattaaatcttttgcattttgaactgctgcttggtaagcatctttttgcggtttatcttcattgataaacttgctaccagattctgtttgttgttgatcttgaatactattacgtaatgcttgcattgcttgatcaagcgcttttgcttcagctaatttttgcgctacttcatcacgagttgctgcgttgtttatttggctttcaagtgcttgacgttgcggattattcaaaccatttaattgatttaaatcagtaaccgcatgttgtttatcgtctgcaagtttttgatcaccgtgtaggttatctttagcttggttaacagcttgtgtcaattgttcaacttgtgctttatcaagcgttggattgttagtttgattaattaaatcttttgcattttgaactgctgcttggtaagcatctttttgtggtttatcttcattgataaacttgctacccgcttccgtttgctgttgatcttgaatgctattacgtaaagcttccattgcttggttaagtgcttgtgcttcagttaatttttgtgctacttcgacacgagttgctgcattattgatttgattttcaagtgcttgacgttgtggtgtattcaagttagacaagttatttaacgtttctgttgcacgttgcttatcttgagctagtttttgatcaccatgtaaattgtttttagcatcagtcactgcctgtgtcgcttgatcaatgattgatttggctaatgtaggatcagttgttttgttaatcaaatctttcgcgtgttgtactgcttgcgtataagcatctttttgcgcttgatcctcgttaataaatttactacttgcttcagtttgtggttgatccttaatactttcttttaatgcttttatcgcttcatttaatgcttgcgcttgtgcaatgatttcagccactttatcacgagttgttgcattattaatcagtataattttggttttgttttgttgtcgcattatctgcaatactttgacgtaatttgtccattgctgcatcaacattgtttgctttttgttcattaccttgtgcttctgcaacagtagtcgattgttgtaccaattgttttaatgcctctttttgtgcatttgttaaatggcttaaaccgtcaattgctgtatttgcgtgttgtttagctttttcaaggttttgagtaccattaagcgctgcttttgtagtattcacttgattcatagctgcttcaacttgatctttaggcacgtttgtacctgtagatttatttaaaatattttcagcattacgaaccgcttcattgtatgcatttttcttctctggatctgcatctgcaaagttttgactgccaagtgtagtgtctttatcattcaagctatttttcaagttacccatcgctgtattcagttcctgagcggtttgaatggcttgcgttacttcagctacagtgtgcgcttgattgatgtttccagtaacagcacctttttgtgcattgtttaagttatctaacgtagataatgtttggtttgcattgtttttagcatctgttacttttctatcaccattcaacgcttgtttagtagttgttacagttgaaagtgctgcttcaacttgtgattggttcgcatttgtaccatttgcttgattaataatattttcagcagcagttaccgcattgttgtatgctgtttgtttttctggatctgcatctgtaaagttaacactttgtttcacttgatctttgtcttggattccgttgattaaacgttccattgcttgatctaattgttcagctttagttttcacttgatttactgtgctaatatttggtgcatttgtcacttgtgtatttaaatcttgcttttgagcattatttaaatgacttaattggttgatgttagcagttgtttcttgctttttatttgctaagttttgcgcaccattaagcgcagttttgttagtgttcacttgattagctgcttgtgttactgcagatggatcaagtgttggctgactcgttgcattaatgatattttcagcacttgtaactgctgtattgtatgcattttgtttatctgtatctgcatcaacatatggttgactcgcttttacttcatctttattcgcaatactatttcgaagttgattcattgcattgtcaagatttgttgcattgtctttcacactttgtacaccagttacttgtgtcgcgctatcaatttgaccagtaatactttgtttttgtgcatcagataaatgtgtcatttgacgtaatgcatctttagcttgttgcttcgcagttgctaagtttgaatcaccatttaaacttgtttcagcattattgacacgttgtgttgccgcagtaacatctgctgcatttgtaatcacattaggtgaaccatttacaatgtttttcgcagcattatatgcatcagtataagcaccttgcttatcaggacttgcgttagtgtaattaccaccagcaacaattgtgtcatgatcagcaattccttgttttaattgatccatcgcattatcaagtgatgtagcactatttttcagatcagttacacctgatacacgttgcgcagcgttcacttgttgttttaatgctgttttttgtggtgtattcaaatgtgtcaagttatcgatagcttgtgttgcttcagttttagcgcgttgtaagttcgcgtcaccgttcaaagcattttcagtagacgttacactttgaattgcttgttcaacagcttgcttatctttattcgtaccatgatctttatttaagtaagattcagcttgtgtgatagcattatcaaatgctgttttcttagttggatctgcgtcgatgtagttttcgctcgctttagtttgatctttatttgcgattgctgactctaatcgttgcattgcaccatctaagtcttgtgctttcgttttaacactatttacaccgttaactgttgttgcaccttcgatttgtgatgttaaatcttgtttttgtgcattatttaagtgtgttaatgtacctaaatttgctttcgcatctgattttgcttgtcttacatttgcatcaccgtttaaagcattcttagcagtcgttacttgatttaatgcagcttcaacttgtgcttttgtcatattttgaccgtttgctttatctaaaataccttgagcattcgtaacagcatttgtgtaagcatctttcttaccttggtcagcatctgtaaagttcacttgttgtttaacagtgttttggtcattaataccattttgaagttgacccattgctgtatttaattcattagcagtattttgtgcagcagttacacctgctactgtcgttgcattgtcaatttgactagttgctgcagttgattgcgcattattcaagttactatatgaagctaatgcacgtttcgctgactcttttgcttgagcaactttattatcaccattcaagtcatttttagcttgattcaattggtttagtgctgcttgaactgttgtttcattcgcgttgctgccattagcattagtaattgcttctgcttgtgtaaccgcagtatcatacgcttgttgttttggttgatccgcatctgtgtaattgacactacgtttcgtattatccttttcagcaagtgcatgtttcaaattacccatcgctgtgtttaacgatgttgctttatttttagccgctgtaacagctgcaagatttggtgcttgatccacttcagcatttgccgcagttcgttgtgcattgttcaagtctgtcaaacgaccgatatctgatttcgcagtttgttttgctgctgctaatttttcatcaccgttcaatgcagacttcgcactgttcacttggctcgctttttggttaattgtatcaggattcatttcagggttattcgttgcactaataataccttcagcattagttaccgcatcattgtatgcattttgtaaatctgcattcgcgtcttgataatcttcgcttgatttagtcgcatctttagaagcaatactttgtcttaattgattcattgcttgatctaaagtaccggcattagcttgaataccttgaacacctgcaacagtcgtaccactttcgatttgcgatgttaagtttgctttttgagcatcagttaagtgtgacattgtcgctacttgttgtttagctgtgttcttcgcttcatttaagcgcgcatcaccatttaatgcagttttagcagtattcacacgttgtaatgcttgttcaacggctgctttattttcatttgtgccagctgttttatctaataacgttttagctgccgttacagcatcattgtatgcagtttgtttatctctatctgcatcagtatatttctgagctgcttttgtagctgcttcatcgttaataccacgttgtaagttgctcattgcagtatttaattcagatgctgttgtagacacttgatttacacctgcaactgttgtagcaccttcaatttgtgatttcaacgcttctttttgtgcgttgttgattgatgttaagttattcaatgcatttttcgcagttgtcttagcattcgcaacattttgattaccgttcaattcgtttttagcacgttgtacattttgtaacgcagattcaacattgtcttttgcagtatttggaccttgtgctttatttaaaatttgttcagcttgcgtcactgcatttgtatatgcattacgtttcgcttcatctgcatcagtgaagttaacaccttgcttaatcgtattctgatcttgaataccatttttcaagttcgtcatagctgtatttaatgcatccgcattattttgtgcttgtgttacttcattaacatgcgttgcaccctcgatttgacgtttcgccgcttctttttgagcattagttaagtcacttaagccattcaaatgttgcttcgcatttgtttgcgcagttcttaagttttcttgaccgtttaacgcttgttgtttagctgtcacttggtctttcgcttgattaatttcttgcgcattcattgatggactagttgtttgaccaatgattgcttttgctgcagtgactgcactatcgtattcactacgattattaggacttgcatctgtgtagttttgacctgctttaatcgttgcttcattcgcaatgctatctcgtagacctttcattgcagtgtttaatgtttgtgcattatcacgaacagtttgaacatttggcaacgtcgtcgcttgacccacttgttctttaagttttgctttttgcggaccatttaaagaagttaaaccatcaattgctgtgttagcattttgtttcgctacttctaaattatgattaccgtttaactgcgtcttcgcattcgttacttgcgttgctgcatttgtaacatctgatggtgttaacgttggtgttggtgtaccattaacgatactttcggcagctgtcactttttcatcatatgcttgacgtttattcgcatcagcattgacatagttaccactagtttttgtgtcagctttatcagcaatagcacgttttaaagctgtcatcgcagtatttatttcagtcgcagtatgttcaacaccatttgctgcagatacgcgtcctgcacttgttacttgtgcttttaatgcttctttttgttttgtatttaagtccgaagcgtttgtaatcgctgtgttagcagcctgtttcgcacgttctaagttttgaataccgtttaatgcagtatttgcttgtgcaacagcttgcattgctctttcaacatctgctttaggtgtattaccgccagctgttttatttaaaatagttgctgctgcatttactgcttgagaataagccgttcgtttagcatcatcagcatcttgataattttgactttgtaacgtcgtgtctttatcacgaattgatgtttctaattgacccatagcaccatctaattgttgcgctttggctttaactgtattaacaccttcaacatttgttgcttgtgtaatttcattatctaacgcattacgttgtgcattattaatgtgtgttaatgtacctaacgtttgtttcgcagcagctttagcttcatttaatttcgcatcaccgttcaacgccgtcttcgtactgttcacattttgtaatgcttgttcaactgctgctttgtctacattttgaccactagcttttgttaaaattgctttcgctgcatttacagcttgatcataagctgatttcttatttggctctgcatctaggtatttctgagtttgttttgtttgtgtctcatcattgataccattttgtaaactatgcattgcgttatttaattctgttgctttggcagtttcttgatttacaccagctactgtagttgcaccatcaatgctacgcgttaacgcatctttttgtgcattgttaattgatgttaagttatttaagttgtttttcgcagttgtcttagcttgagctaagttttgcgcaccatttaatgcatgttctttagttgtcacttgtgatgttgcttgcgtaatagtatttggttccatcgttgggttcgatgtttgattaatgattgcttttgctgcagtaactgcgctgtcgtactcgttacgattagttggacttgcgtcagtgtagttttgacctgctttaattgttgcttcattcgcaatactatctcttaagcctttcatcgctgtattcaacgtttgagaactatttttaacagtttgaacaccttctaatgtagttgcactttgaacttgttcttttaattttgctttttgtgcattattcaattgtgctaagccatcaattgtattattagcattttctttagcaacacgtaagttgttatcgccatttaatgctgttttagccgcattgacttgtgaagtcgcactatttacatcattgactgttaatgtcgcattcggtgtaccattaatgatattttcagcgttagtcacttttgaatcatacgcttgacgtttttcttgatcagcattgacataattaccgcttgcttttgttctttctttatcagcaatagctgctttaagtgctgtcatcgcaccgttcaattcagtagctgtatgttgaacgttatttgcatcagatacacgttgtgcattgttaacttgtgtttttaatgcatctttttgtttttggtttaagtcatgtgcgttgttaattgtgttcgtcgcatttgttttagcttgagctaagttttgtacaccatttaacgctgcttttgttgtattgacttgatttgccatgccattaatcgcattagcatccatatttggattgttcgttgcattaataacaccatttgcattatttacagcagtattgtaattatttttgttgctatcagatgcatcaagataattttgacttgttttcgtcgtattatcattttggatacttgtacgtaatgcacccatggcagtatttaaggtattacctttatctttaacaccatttacacctgctacattttgcgcttgttcaacttgatgcttcaagttgtctttttgtaattgtgttaagttaggtaaaccattaatcgtatttgttgctgaagttttcgcatttcttaagttttcagcaccatttaaagccgctttcgctcttgtaactgcatttaatgcattatcaacgtctgctttagatgtgttaccaccagtttgtttatttaaaatgccttcagccgctgtgacagcttgcgtatatgcatttcgttttgattcatctgcatcaagataattttgatttcttaatgtagcatctttatcattgattgcaccttgtaagctattcattgcgtcgtctaatgtattggcatttgtttttacagtattaacgccatcaacagtcgtcgcttgattgatttgaccttctaacgcagtacgttgtgcattcgtaatatggtttaaagtgcctaagttttgtttagctgccgctttcgcttctgccagttttgcatcaccattcaatgcatctttcgtacttgttacttgttgtaatgcacggtcaactgctgctttatctgaatttgaacctgtttgtttatttaaaattgctttcgcagcagctacagcttgatcataagcagttttcttactttgttcagcgtcacgatatttttgagtttgttttgttgcattttcatcatcaataccatgttgtaattgacccatagctgtattaagttcatttgcagtttgttggatacttgttacatttgcaacacgttgcgcacttgtcacttgtgctttcaacgcatctttttgcgctttatttaagttagtagcaccatcgatggcatttgttgctgtttgtttcgcttgcgttaaattatgtgtaccatctaatgcatttttcgttgatgtcacttgtgtagcgatttggttaattgcattagcatccatatttggattgcttgttgcattaatgacaccattagcactatcaacagcattgttatagtttgttttgttacttcctgtagcatcaagatagttttggccatttttcgtagctgtgttatcttgaatgctatttcttaacgtacccatagcaccatttaatgtgttggcacttgatttaacagtatctacacctgcaacattttgtgcttgttgcacttgttgtttcaatttatctttttgagcagttgttaaatgttgaagtccgtttatagtagtgtttgcatttgatttagcttgctctaaattatggttaccatttagggcacctttcgcattagcaacttgtgacaacgcgttttcaacggcagctttatctaaatttgatccactatttttatttaaaatattttctgcgttcgcaacggcttgagtataagcagttttcttatctgaatcagcatcatgatagttttcacttgctagtgtatttgctttatcattaataccattttgcaagttagccatcgctgtattcaattgtgtacctgtattagatacagcttcaacaccagctacagttgttgcttgatcaattttagttgttaagtcacgtttttgtgcattattaattgacgttaagttatttaatgcatttttagctgcattcttcgcatttgtaacgttttgatcaccattcaatgcatttttagcacttgaaacattttgaatagccgcttcaacatcttgtttagacgtatttgcaccttgcgttttattcagaattgcttcagctctgcttaccgcatttgtatacgcatcacgtttagctttatctgcatcagtgaagttaacaccttgtttaactgtgttttgatcatggatagcttgttccaagttgcccatttgcgtgtttaactcagttgctgcatttttagcagctgttacctcactcacatgacctgcacggtcaatttgtgatgagatggcagatttttggttatttgttaagtgtgataacgtatttaagttttgcttagcagtgttttgtgcatttcttaagttttcagcaccgtttaaaccatttttagcattattcacttgtgttgcagcttgggtaatcgcactagcatccatagtcggattgttagtttgattaatgatacctttcgcatttgacacagcgctattatatgttgattggttattcggacttgcgtctgtatagttttgacttgctttgactgttgtttcgttagcaatactatctcttaagcctttcattgcattgttcaatgcttgtccatttgtttgaacagattgtacgtcttctaatctattggcttgtcccacttgttcttttaatttagctttttgaggagtatttaattgcgttaatgcatcaatagcagtattggcgttttgttttgctacacgtaatctttcgtcaccatttaattcttgtttcgcgctgtttacttgattagctgcagctgttacttctgaaggtgtcgtaacaaccgttggcgtaccgctaataatatgttcagcattggtaactttagttgtgtaagcattttgtttagtgctatcggcgttgacatatttactgcttgctaacgtattcgtcttatctgcgatggcatgttttaatgtgcccatcgccgtgttcagttcagtcgcattacgttgtacatcttgtgcattagatacgcgttgagcaccattagcttgtgcttttaatgcatctttttgatgttgatttaaatcagatgcgccattgattgctgtaatcgctgcttgtttcgcattgtttaagttttgcgtaccatttaatgcatgtttcgcattattaacattattaagtgcttgttcgactgctgttttcgctgtattcggtccagtttgtttatttaaaatggtttcggctgctgatacagcttgattgtatgcattacgtttttgctcatcagcatccaagaagttttggctcgctaatgttcctgacttatcgttgatagccgtttgtaagttacccatagcaccatctaaactattcgcattttgtttaacagattcaacaccagctaagtttgtagcttgtgaaatttgatttgttaaatcattacgttgagctgtagtgatatgcgttaaagtacctaaatgttgtttcgctgcgttttgagctgcaattaattttgcatcgccattcaatgcatctttcgcagtattcacacgttgcaatgctgcttcaactgcattttgcgcagtgtttggaccatgttgtttatttaaaatcgctttcgctgcagtaatagcattatcatactcttgttgtttatttgtatcagcatcacgatatttctcagatgatttaacttgagattcgttgttaataccactttgcaagctagccatagcttgatctagatgttgtgcattttgttttacagtatcaacaccactaactcttgtcgcactactaatttgactaatcaaattgttcttttgagcatctgtaatactcgttaatgtgtttaagtacgttttcgcattttgttttgccgtagctaagttttcatcaccgttaagtgccgttttagaactattcacttgctctgctttttgtgtaatcgtacttggattcatttctggattactatttgcattaataatcgtttcagcagcagctactgcgttgttatatgctgtttgcttatcattattagcatctacgtaatcttcacttgctttagtcgcatctttgttggcaatactttgtcttaacgtattcatggcttgatctaatgtattggcatttgattgaaccgtatgaacaccagcgacagtagtaccactattaatttggtttgttaaattcgttttttgtgcagttgttaaatgcgtcatattatttaactgctgtttcgctgtttgcttcgcttgatctaataaacgcgtaccatctaagttatttttagccgaattcaattgattcatcgcttcagtaacttgatctttcgttttattttgaccatttgatttatttaaaatatctttcgcagcttgtaccgcatttgtgtatgctgttttcttactaggtgtcgcatcttgatagttttgactattaagcgtcgtttgttcatcattgattgcaccttgcaagttacccatcgctgtatttaaatctgtaccttgttgtttaacagtatttacgccagcaatatttgatgcagcattaattttagatttaacatctgctttttgtgcattatttaaatgtggtaatgcatcaattgctcttgcagcatctgttttagattgtgctaatttttcatcaccatttaatgcatttttattagaagtaacagctgaagttgcacgattaacatcatcaacagacatcgttggatttgttgtttgattaatgattgtttcggcacttgaaactgcactgttatatgcattttgtttagctgtatctgcatccgcataatcttctgtacgtttcacttgatctttatctgcaacagcttgtcttaagttacccattgcactatttaagtttgttgcattttgcttaatcgtattaactgtctcgatttgatgtgcactattaatttgcgattgtaagttttgacgttgcgcattattcaagttatttaattgacctaatgcagtgttcgcttcttgtttcgcagcatttaacttagcttcaccattcaatgcatgttctttactagtgacatttgataaagcattgttaacatcacttggtgttataactggatgttgtgcattaccattaataatgtcattcgcatggttgtatgcattgttgtaatcatttttcttattagtatctgcgttgacataattatcactttgtacgacttgattatgattagcaacgccacgttttaaacctgtcatagcagtatttaagctttgagtcgtttgtttaatatcatttactgcatgtacattttgtgcactattcacttgttgtgttaatgcattcttttgtgcttggtttaaatcacttgcatgcgtaatcgcatttgttgcttctgttttcgcacgttgtaagttttgttgaccatctaaagcatctttcgtcgatttaacagatgctgctttttggttcactgtgttaacatccatcgttggattagtcgtttctccaatgacacctttagccgcattaactgcattatcatacgcttgtttattagctggtgttgcgtcagtgtaattttgacctgatttaattgtattattatccgcaacactgtcttttaatttcgtcatcgcagtatttaaagccgtaatgttagacttaattgtttcaagagcagcatgattttgagcagcattaatttgttgcgtgaaattattttgttgtgcttggtttaagttagatgcaccatgtaatgttgttaacgctggctgtctatctaatgttaaaccttgacgtgctgtatttaattgatccttagcttggtttgcctctgtcactttatcattgatattttggacagttgggttgccattcaacacttgattaatttcagttaacttttgacgcgctgcttgtaatttttggttgtacgcatttaacgaagcggtcgtcatacctgttgtatccgttggttgattaatgctttgttctaattgcgttttcgcagtttgaagcggtgctttatctggtgttaacgcttgacgtgcatgatctaaatcagatttagcttgatttgctgcagacgtatttgtattaatttgttctacagtcggtgaacctgctaatacttgattgatttgttgaatcttattacgtgcagctgttaacttcgcattgtatgcatttatagagtcttgtgtcataccagttgtacttgtttgcgtgtcaatactatgttgtagttgatttttcgcattttctaaaggcgctttatcaactgttaagccattgcgtgcttgatcaagtgctgttttagcagcattcgctgctgtcacgttttgacgaatcgttgcaacatctggatgagatgccagtacgcgatcaatttcttgaattttagttctagctgctgaaagtttttcattaaatgctgcaatagatgtgcttgtcataccagtcgtactcgttggctgatcaatatcattttgcaactgagtttttgcagtttgtaatggtgccaagtctggtgttaatccagcaattgcttgttttaagctattatatttttcttctacttttgttttttcttcggcaatttgttggtctgttgcgtcaccattgttaataacattttgtgcatttgttgattctgtttgacccgcacgtttagcattttcatatgcttggattgatgattgtgtcataccatcagtagttactgatttattgatttcttcatcaagtttcgtcttagcagttcttaaagcactattatcagctaaaggtactaattgattaattgcttgcgttaatcgctcattaacacgatttacatttgttaatgctgtttgtacctcttgcactgatcttattggcttctgaatgatagcattagcactatttttagcacttgtaagttctgcttgaagcgcatgcattgaattattatacgcagtaatacttgctggtttcttaccagtcgttgtacctgtgcgattcaattgttgcactgcttgctctaaggtatgtgtatctgtagttaaattttgtttcgcttggtttaatgctgttaatgcgttatcgacacgatgtttttcctctgaaatttgctgcggtgttgcatctccattgtctataacacgttgtgctgcagttatttcagtttctgcttcacgcttcttcgcattatagttatcaatactttgttgcgtcataccagcagttgatggtacttggttcacagaactttgtaagttatttttagatgttactaattggctattatcttctttattttgaagtaatgctttagcttgatcaatcttagtttgtgctgcacgaactttagttaatgcgtcagaaacttgttgtggtgttgcacgatcattattaatcacttgttgcgcttctgtttttgcagtattgatttgttgttgcgcattatgaattgcattattgtactgcgtaattgtacctggctttttaccttcagtgcttactggatcatctaaatgatttttagctgtgattaactcacgtttatccgcttttgtgaaaatggactcttgtacttcttcagtactaccatcattgtaagttactgtcacaggaatcgtcgttgtgctaccaccagctaaattagtaggcattgctgtgccatttttaatcgttgcagtacgtttattagcaacttgaactgcattgttaatttcagctgctgttacatttgaaccataatctttcacaatttcagttgtgttgacagtatgagctgccggtgcagttaatgtacttggattactacttactgagtgacctgtacctgctttcggagtaattgtgattgatgaatttggttttatagtattggcattgaacgtcactttaccagtttgtgcatctaacgttacatagtcaggcttattcgcaattgtccattgattattttgaccacgaacaacattaattgtcttactatgttctgcaccattacccactttttcagtgtaagcaatatccattgcttgagttggattaattaaatgtcctgatggattattaggcgtgatatcaatatgaccattttgccaaatcttagtagtcgcttggttcggttgtggtgcgacaactgtgaaatcatcactacgttgctcatcacttactgtctctccgcttccttgcgttgcaacaacttgaattgtatcagcagggttgaaagtacctgctgcaacagtaataccattattagttccagcaatacctgctacagttgctgcagatgcttctttcacccatggacttgtattattgcgacgtgtaaatgtcgtcacaacgttaccattacgtttaataactaatttatcagcgtatgtcgttacgttacctgcatgtgtattcactgtttggtttgctccaggtgcaattgtaatcgctcctgccgctgtttcagtcacagttggtttcgctggttgcacatcttttactacaaatttcgctggtaaagatgttgcaaaagtatgtccgttatagatgacgtcatattttgcgttaacgactttagccacattcggtttattcatagctgaccagtttgcgtcatttgtacctgtagtatcacgattccatttatacgtaaatccatctgttggtaaaccagtagcattttgcatatgtgcatatcctgatgcttgcgtaccacttgctaaagtgcctccaaccgttgtcgtataagtagtttgagggaattcaaattgatatacattaacagtaacaggaactcgtttagcagctgaaatacctggatatgtgacatcgacatttaaatgttgcacgcctgcttgttggttatttggttgttgtctatttgcccatgctgcagtgataccatttgtgtttgtatttggatcaaatgtaatgtagttcatcgcatccgttccattagtcaaattttgacctttcacatcacgtgatggcgcctttgcattagcaactggataaactttgactggaacttcaacattacgcgtaccttgaccattaggtaatgttacaaccgcagttttatgagtgttaccgactgtattcttccatgtatctggactatcatgccatgcaaccgttgccccatgtggcgggttttgaataaatctttctacgtgtccgaaatcaaaaccgtcgccacctttaataaatacagcaccttcagtagttgcttgtaattgtggtgtcactgttactgttgcactgtcatttgaatcaacagattcatttcttgttacatctatcgctcgaccatgttcatcttgagtagtgtacgtcacattattcattgtgatagaagaccttgccttaatcacaccatttggtaacgcatcacttaccgttacaactgcagtattaccactaccataagtcgtgtttgtaatcgttaatggcgtattatctgctttaaataatttaatagatgaactacttaacacattattaattttaatttgttggttagtaagacctgctttataagtcacagagttgccatcaattcgcggtggatctggtttaacttttgctaaaatcttgataatttgcgtttggtgattatcataagtaactcgaatatcccttgttgaaataccaaccacatctttacttggtccatatgaatttgtaaattggaaattcatacgttgcgcattttgtgtccaagaatcattaactggtttaacatattgtttcgcatcatacacatcagatacacctgggaacacagcacctctattcgtctcaaagacatgcttcggtactgtacttactactttatatgttgctgttttcgtaatcggcgttgtttcaccatcaattaagatatgtgcagttactgttatatcttcaccaatacgtgtattatctttatttggcgcttgtccacttacccatgtaatagttgcatctggaatggcactaccattagataacttaaagtaatctgatgcactagaaccattacctgctgggaagtcttggccttgtacagtgtaatgcgaatgtgcaacgatttctggaatgacatgctttacaggtacagtcactgttgatgttgttccatcttgataagtagcagttactgtaacattggcattatttccagtacgactgacattactaactgttttactagtgatttcattcgcacttgctcttgcataacttctatttggtactgtttcagtaaacgttaatgaattaataattgctgtttgatcagcttgtgatactgtcgcattattcgaaatattggcaattctcacaggattagcagccgttgatgaagtaccaactcgatatttatcacgcaaaggtttcactgttacattgaacgaagttgtagctgtattgccgcttgtatcagttgctaataaattgattgtcttattagttgctgatgtcacatttggtgccgttgcagaaacatgttgatggttattatcaacagtgcctgtaatttgtgatgtatttggtacagttacagattgcacaccaaagttatcattcgctgtaatagtatttgtaaatgtttcacctgagaacacttgatgattagtgtaattacctactgaaattgttggattcactaaatcacttggtacaaaataaatgttaatagcgtcagtagtatttcctgtattttgatttaaatgttcaacatattgttttggaccatatggcgttaagtataactgtgctttataaactgcatcacttgcattatgtgtagaattactttttacaacgtggtcaattgtaaatgcgctagcaccattagctgccggttcgtttacgttaacaacagttgagttactatggtttgcacgagtatttgaatttgtaacaggttgcccaccataaccgtttgaagggttgatgatgtctaacacttgaatcacttgaccattcaacgtaaattgacgttgaccatcagttgtcgcatttgattgtgaataaccagtcgttctaaagttaggtcttccgccagcttctgcttgtgctttttcattaccagtaatattattacgcaatccaggcactgtagtagtcgcttttagcattgttaaaatatcattagttgtaatttgtgtgcctaatgtagcatcataacgataaattaaagatttatggtcatcagaccatgataaaccaccatctgttggtctgtttgcaatttttgcattcgtccatgtcactgtataatcttgcgggaaattaacccaacgcaagaaattcatattagctaggtttgacgcgaatgatttcgttaatcgacctttattaatatttactgtaatagtacttacattagcaccattaggtgtatttgtaactgaaatattaccctcggcaagcgtaattacatctctatttgcattaataaaagcttgttttacttttgagatttcatcagttgttaaatcatatgttgacgtacgatagacacgttgatcgccttcaggttgtttcacatcaacgatttttaaactaatatagaaatcttcagtgtctttatgatatgcatttgaagcaactatatgatataactgcgtgcctgcattcatttgactaacttcttgtgcagttagaatagttctatcagatgtaatatttgtaaatgtgccacttggaatagcttgtccattacttaaagtaaaatattgtttaatatcaccaatattaaatgattgtcctttagcaatcgttaccgttgctgttttagctgcattggcagtttgatattcagatttcacaactggttcgtatgtcatcacatttgtagcatcaagcgttgttgatgagccatcacagtaatgtaatgtgacattaccattattatcgacagttactggatcagttgatgctaaatatcctcttatattttggtttttattcataaaggcagtaattatgctttgcttttcatcattagatacagcagtcggattgactactacaactttctcagtatttcctaatacaatcggatgagcatcttcactaattttacctacatgaattgacacatgtttagattgactatcatttgtcgtattattgacattatctgtcgctgatactttaaatgtaatatcactgttaaacgcctgattcatactcactctacctgtaatagctaatgagccgtttttgttgtcggatttagttaaatttgatgtccaaccattcggcaaagtagtaatagttgtattttttataccagaatgtctatcagagactcccattgtaaagttgacttcgtcgcctcgatagtatttggcatttattccaacaggattattgattgttggtggaatgtcatctggcaaaatagtaacagcattactcatattagatgcaactactttattataataaactactgctctaatttgtttacctacaggtggtatgaatacaacataatcttgcggtcgtatagtaattgtattatgcaccccatcaggtgtaccagtcgcaagtatcgtataaccagatggtatttgatctgcctcactaccaccattcgtagtttgatttgttggtgcaactaaataaaccaatgccgatggatccaacggtattcccgaaatattaacaggcactttttgtaatgctgtacctcttaattgctcagctgtcgttgtaattgttggtgtatgtggtttaacacgaatttcgaataattgttctttacgtccaaaacgtatcgttccaaagtaatcccctggtaataaattaccaacaagttcaatgttacgttctctagcattattagttctatttgtcgagttttcaatgtgtaatgtacgcggaatacctgtaatttgccaatctttatctgtaaaattctcattacttgttaaattaatacgtaatggttgaatagatgttacgctaccacctaaattcacggaagcattcccttggttacctgcatatacatagaaaactggatgcccagcttgttttgaaaatggtttttcagcaatgttttgagtatcgtcatttttaaagaatttaatattatgttggatttcaggtaataccgttaagttaacaggaactaaagtttcactattaccataaccatcaggatagtcgaaaccaatcattaatcttattgggtttctagttcttgctgcttcttgtaatttttgatcagtaaataattgacttaattgatattcatttaattcctgaacgccccccggtctaaaagcgttagtagttgcattagttgggtaaaaacctaacactttattactcggcgtcttaacataacttaatggatcatcaacaaaatcatctatatttaggtttgtactttctaatacctttttcgtttgtacatttccttgactcacttctacacgtttagttgtacctatgcgatatgtacgattaaccacttgtcttaaaccattaagacgttgttgatggtcttgcgttgattcgacgtatagttgactgtacataaataattgattgtactctaaagcacgcccacctgctgcatagtacaatttattaacagttggaccttgtgttttaaatgaaattgtataacttgcatcaccttgaccgatgaaagtataaactttaggaacacccggtgattcagcaggtttttgaccattaatatattcaaaattttgtctaccaaatgctttagtagcagctgttgctccagcttcactaaaataatcactcgctctagataaatcttctaaagaataaacatggacagttggccagctatatattacttggccacttctatttcttattttaaagtcatgtgaacgatcaggatcatttactccatattcccacatttgttgaagtggtttatttgcacctgcttctgctccatgactccattgtacatttgttccatctgaattaactgttacaaagtcagttcttcctactggcacttggtctgctggtaatgcaaaccagaaaatcatattttgatgtggagcatgtcctttattaaacttaataacccattggtagccatctccagtttgtttcgctgtcataagagcaatttcctttgagtcagaggccttcaatgtattccatggtgtagttggtaaattatatggcgcccctttactagaagcattgatatatgtacctacaggatatcctgaaccatcattagcattttcaacataatatgatgaatttgcattttgatagtctgatactgatctaggctctgcagctctagactcaacagaacgcgtttgaattctgtttgatcgacggctagtttgttgacgttgaggcattgtacgaattaaagcaacagcttgttccaattctttgtatgcaagttgcaagtctttattgtttattggatcattactgcctaataacgtattaatcttttcaaaaatgccttttacatagttaaatgtgccagaatctgcattttcacggtcaataaagcgataatcatgataatttgcatcaaaaaatgcttgtaattcatttcggtcatgttgtacgttaccattatcagatgaatctgaagctgttactacatttgcttcatgattttctaaatgagccgctctattgtcgtttccatttttattagcagattgactttcgttttgtttatgcttaccttcttctttatctggttgtgttgtcgcagccgttgccgaatctttctttgtatttacattttgagatgctggttgttcatcattagtagtagatgattgcgctactttttgatctactaaattagcttgactaatatttggttgctcattttcatgagtagcagataatgattgactattttgtgaattttgagaattttgtacttgagattctcgattctcagtctgttcattattactttgttgtttctgtttaaccacgcttgctggttgatttgtttcagcagcatgtgcttgtgatgtattgaatcctaaaaataccaatgtcgcaatgacagttgaaaatgtaccaactgtatatttacgaatactaaacttttgaattttatcacgataattcacagctattgttcactccttatcttgttgttatgtctctgttgtgttgtgaatgtatttacttttgattgcttgtatattgtaatgctcattccattctcatttaaaaatttaaaacgatgacgattcaatacaatttcgcaatctatccaaaaagtattgaaacacattacaactatgtgttgaacaatttatttatgctccagaatataataacacaaaatatattgtatggtaaattgaatttgtgacaatttataataattataaataaagtagcgtaaaagagtaataaaaaaccaatccctatgttcatttaaaataatgacacataagaatcggtttatatttttgtttaatattgtagcgacttgtatgatttcaatttaattctcaattatcataattgagtgtcgttttgtttaggcacaagtaacaaaatgataacgaatgataatattcccatacctgcatttaaccataatgcaatcattgcacctgtataaatgtttgtcatatttgatacgattgcatatactgcaccactcaatgcgacgccaaatgctccacctaatgcagaagccattttatagatacctgcagcaacgcctactttttctaacggtgcatttgcaattgctgtatctgttgatggtgtagcatatatccctagtcctaaaccaaagaataaataacctataatacaacaaatgacatacaatatttctggcaagaaagttaatgaaatgagacattctccgacaataagaactcctgttccaattaacattggtttcttgcatccgagtgtttgaagtaacttttcaccaacacgaatcataattagtaccattactaaataagtgattgataaacttcctgcttgcaatgaagaatatcctaaacctctttgaacaaatgtgttggctactattaatgttcctgcaacaccatttaacaaaaagtttgaagctgttgcacctgtgtaagctttatttttaaataatttaaaatcgattaaaggatttgtagcacgcttttcaagaactataaataaactaaaagatccaattgtaattgctaataaagtgataaaaagaagtgagctaacacctaattctgatcctttagtaattaaaatatttaaactgagaagcataatgactaaaagaaccagacctttaatgtcaaatttatttagagaaatcgatttagatttagtttcaggtgtgcctttaataagaaaaagcgcaattaatgaaattataattgataggatgaaaatccaacgccaacctaaaagcgttgcaactgcacctccaaaaaatgaacaaacaccagagccgccccatgagccaattgaccaataacttaaagcgcgttgtctatctttcccaatgtaatatgacttaataatagacaaagttgcaggcataatacatgctgctgaaagtccttgaattaatcttcctataataagtaataaaggaatatttgaaataatgattaataatgaacccaatatatttaagataataccaatgttcgtgagtttaattctgccatatttatcagcaagaccacctgctcctactacaaacattcctgaaaataaagcagttatactaacggcgatattaaccgttccaatatctgtattgaaactatcttcaagtattggtacaacattaaccaatgattgtgcaaatagccaaaacgttattacacttaaaacaattcctattaacaacttattattgccttcaaatgcctctcttgacggcttttccatctctatttgcctccctatacttttgaaaaacagacaaattccataacagaaatttgtctgttccatagaataattgaatggtttttgattttaatgtgtaaaactttaaatttattagtagtccatccatttattcttaatgctagttatcttaccttatgctgctttttgtttcttcttataataataaactggtataccaagtgctgttattagaattccaatgattgctagtataaattgtgtaaacagtgtattaattaatacaaatgaccctgccaaaattgcaattaaaggtatgattggatataacggtactttatatggtcgctccatatttggttcgcgtttccttaaaattattaccgcaacaaatgacatacaatagaacaaccaaataacaaagattagcatgtttgtaattgtatcaaatgctcccattgacatcatgatgatagcgattataagttgtataattgcgccaaaccatggtgcgccagattttgttaattttgcgaataagtggctaaatggcaataattttctttcagccattgcatatggtacgcgcataccagtcatagtatagccattgatcgtaccataaacagaaattaatataccgattgtaataatcttaccgccattttcaccaaataatatttttgatgtatctgaagccgcatttaaattaccagcaagtagttctattggcaacgttaataagaatgtagcgttaattaataaatacacagccataatacaaccgataccaactgaaatcgctaaaggtaaatcgcgtttaggatttttaagttcccccgcaacatttcctacatgaatccaaccatcatatgcaaacatagttgctaataaaccactaccaattgctgtaaagaaaccatttcctgaattacctgtagttggaattaatgaaaaagtgatatctccagattgaaaaataccaaaaattacaataacgatgattggaatcagtttaattactaaagtaactgattgtaaaattccgcctgcttttgaacctaggaaatttatcaacacaatagataacgcagatgcgattgctattggtattaacgaacctatagataaatggaataaattaattagctgtgtcgcaaatacgatagacaatgctgctacgttagctggaaaataaataaatgattgcgcccaacctgataggaagccccagaaatcaccgtatgtatattctatatacttcgttaagccacctgtttcagggattgcagcagcaagttctgctgctgttaaccccgcacaaatggtaatgatgccgcctaggaaccatacaaacaaggccattcctgctgttcctgttacttctgttacgtttgatattttaaagaatactcctgaaccaataactgtccccataacaatagcaaacgctgagaagaaacctatatttttttgtaattctttaccatttgacataattacacctcatttttaagattaaatgttttaacctaccacacccttgcttgtatctgcaatattcagtccatgttcaatgacacctgaaactctagttaagtcaacattcccgcctgaaactaaagcaacaacatttttatcttcaagccatttattgtttatttttccacttaaaattgcagctgttggtaatgcgcctgcaccttcagtaataattttggcacgctgcattaaatctttcatagcatgttcaatttcttcttcagtaacaagaataaattcatctactaaatgtttaactacttcatatgtttgttcaccaggaacttttacatcacaaccatctgctatcgtgctatccactcgatgttcagttaaatctctcttatagaaagactcagccataccatgaacattctcagattgaacaccgataatatgaattgaagggttaaatgattttaatgcggtggcaatacctgcaattaatcctccaccgccaactggtacgatgactgtattcacattccaaatatcatctaaaatttctaaaccaattgttccttggcctgccattacaaacttatcgtcatatggatgaacgattgtcatgccattttctttcgctaattcttccatataaagtctagtttcgttaaagtttttaccttttaaaataacctttgccccatagccttttgttgcttgttgtttcgcttgtggtgctgtttcaggcattacgatagttgcatcaatgcctaataatttagctgttaaagcaacaccttgtgcatggttcccagcagatgctgcgataatgcctttttctttttgttcatctgttaagtgattaattttattgctagcgcctctaaatttaaaagatcctgtgaattgcatattttctaattttagaaatacattccctttagttatactttggcttaaatacattgatttaattagaggtgttcgacgaataaatggtttaatgcttgctttagcttcttcgatatctcctaaacttacaatatgtgctgtttgtaatgtaactgtgttggttgtcataataattacatccttccgttttgtaaatttttagtccaaactataatgctatatttaaaatattcatttcactcaatttcatttaaattattatctattcgataacatttaatatttctttataatctaggtcatgtgatgaagctaatccttgatttgtcacttgtccttggtaaatgtttacaccagtacttaaggcttcattatctttaattgcttgttctaagcctttgtcacaaatttctaatatataatcaatatttccttgtgctaatgccattgttgaagttcttgggactgctcctggttggtttggtacaccataatgaatcacaccttcttcttcatacactggatcagaaattgtagttggtctaattgtttcaatagttccaccttggtcaatagctatatcgattaatactgaaccttttttcattgatttaaccatctcacgagtaaccaattttggcggtttcgcaccaggaattaaaattgtagaaataaatacatctgctttttttatttgttctgctaaattttctggtgttgatttgactactgtgacatctttttctgcatacatatcttgtaaatatttaatgcgatcatcgtttaactcgataatgattactttagcatttagtcccaaggcaacatttgctgcatttgttgctgctactccaccaccgaaaatcacatatgtactaccaggtatatccacattttcatgtacaccagtcactaaagtaccttgaccaccatgttgtgcttcagagtagtaagctcccataattgctgagcgttgacctgctatagcactcattggcgctaataattctgcttttccattttttataatggtttcaccactaatcgcagttacaccaacttcttgcattttttctactatttcttttgaagatgctaaatgtaaaaatccccagataatttgattctttttgaaatattgatattcgctttcatgaggttcttttactttgataacaagatcagcttcccatgcttgttcatgagttacgatcttagcgccttctttttcatacatatcgttagaaaatcctgaaccaatgccagcatttttttcaacaattactttatgtcctgcatccgttaacttacgcacattttcgggtgtgcaagctacacgtccttcaccttgttttaattctttgactactgcaactaacatttgcaacactcctctttcatttgtgaataatttcacaattattttatcctttggttatgaatatgtaaataccattaattaattattcatattttatctataatttgttaataaatatttaatatattattcttattcttaaatattatgtgcaattataccactatatttatttcttatactccatttgatttatagttgtattaatacattgactcaaaaactaattaatcaaatatgttttttagattaataaagttgtaactgtactattttgtagtgtatggtaatttatttggatgaaatataattctgtaaactctattgattaatcaaatatgtatctatcaaaattcggcttatttattcactctgacatatccaaatacgcaaaaagactatttctaccttgtatcgatagaaatagtctttttatacttaattggtttaatttttcataaaattttatacttttttaaaaatgggatgaaatatattttcctgaaacatgtaattcatgttcgttacaaattgataaaatatgattaagtgttgttgcaaatgacattttctcaaaaagcgattcactatcaattggtacttgtgtgtgaatttcagcaagtcgcttcgataaatatagttcatctaaattgtcattaatcttattacgttgcccagctgataatgcatcaatgttttcaaccacattttcaacgctttgatattgctgaattaacttaatagccgttttctcaccaattcctttaacacctgcatatccatctgctgtatcacccataaacgctttaatatcgattagttgttgtggttcaagggcatattcttcgttaaaacgatgtaatgtatatctattataaatgttaaaaccttttttaattagccagacttcaacattgtcattaatacattgcagtaaatctttgtcgcccgtaataatatagacatcgttatcagttgaatattgttgtgctaatgtacctataacatcatccgcttcatagtttttaacgccaatatttacaaagccaaattgctctgaaatttctttaacataatcaaattgtggtatcaattcttctggtggtgcagaacgattttgcttataaccatcaaacatatcatttctaaaagttgattgtcccatatcccaacatacagctacatgtgtagggcgtatttcatgtattgccgaaaagatatgacgcacaaacccttgtattccatttgtaggtacaccttgtgaattgtacataaattgtttatgaagacttgtagcgtagaaatgtctaaataatagtgccataccatctacaagtaatattttattaggcatttaaaacgttccttctttcttaatataaaatagttttcagttgttgatgtttatctttcaattgattgataagtgttgtatctaaatcaaatgctaataaatcgtttatttgcgtttgaatattagcttcaaaactttcaaattgcgattcagcttctacagccatttgcttaacatataattcaagttgttgcctcaataatcccatttgtggttgtaataatcctaatgtactttgacaaattgattcatgtatatctctttgcccatttggattcaaaattttacgttttgttaattgtttaggcaatgcatttagcatatcattgaaatcgatgtgcaataatggttgctctatattagctgattcaaagttaaactgaggattaacaatgacatgtaaatctgctaattgttgaacgattggtgcaatttgctcagtgagttgcttattaaagtatttttttatacgttctgtaattaaagattgctctaaaaacaatcgttgatgaatttgatctaagtatactttcgtagacactttcttttcttcattaaaatcactattttgcgtcatttgagaattaaacactgatttaacatcgtcaagtagttgtaattttaaacgtgcatttaaatgataaacttgttcttcaacttcgttgtctgtatgttgtaacgtcgcatcaattaattgatgttgtaaacgctgtttatctttatagactgttaacctttgttggcgacgtgaaatatcagctttatttgtttcaaattctgtaatcatctctacataagaacgatccatttgtttaagctgatgaatcatttgttgttctaaaattgatttagattcaacatcaacaaattgttgtatgctttgttttaattgatcaatgcccttatcttcagcttgtaatgcatttcgacttgatacagcaaaaatgtctgattgtaagtgtacttgtcttaatgcatctgatacatatgtttcaaccgcttcaagatcatcttgactttctgctaaatcagcagcattaattaccattttaaatgcttggttttcattcaactggttcatatctttcatgtgttctataaacgccttgtcattatcagtaaatgaatgattaaaataacttacatacaatattaagtctgaagaagttaaaatttgctcggtttcatttgtatgcctttggttatttgagtgtagccctaatgaatcaacaattattttaccttttaaccaatcatgcattaatgcaatgtgtactgtcttaacaaatgttgcatattcatcttctgcactccactttttcaattcctgttgattaatggcatgtttttctccattttccaacatattgacatacaatttataatgtttttcaactgcctgaataaaagcgagttgatttttatttaaatgtgattttaacttttctaaatctgaattaataaagtcttctatagtcgaataagacatatcttggtattcaactactgcattaatttcatctaataattgcgattgtgattttagcgttatataactctcgtctccataagatatttctgtagtagctgctgtagtaggatttggagaactgactaaaatatgctcgcctaataatgcatttatcaaactacttttaccagcactaaatgttccaaatacacctatttttattaatttattatctatacgtgttaatgtttcgtggatatcttgctttgtacgcttgaacaaaggcacatccgaaattatatcaagcgctttttgaatatctatagacatatttgttgtagctgtattttgatttagctgctgattatcacgattatcctgagtattatcagtagccacttgatatgttgtctcttgtcgacctattaatttatctagagattcatctaaatgaatatagtagtgacgataattcttagtcgtcaatgactgacgcagctcatttaattctgtataacgttgatattcttttaaatcatcactttcttctgttggtaattcatctgcctgtacattttctattatttctttaaaaattggtgttgattgttgttcaacatatttcttaatggctttaaccacttcgtctgaaaatgtaagtacataagtattgctgattgatgtttgtggttgatataaatcttcaatcatttccggcttaacgtcataatgctgatttaatactttatctgaagcttcttttttattgataaaacgcgttacaaatgacatatcttctcgcattggttgacgaatttgttgattaacatgttcttgtaacgcatctgtcgctgttaataatcgctgttgttgaatttgtagctttttcttctttttattaaaaaacccaccaacattaaagtcttgagacatactttccaaataacttcgtaacatttctctcatattatgcggcataatgtatgcattttctaaaatatttttacgcttattctttaaaaatgccattaattcatctggattatttaaaagttgtgcctcttcactaattgcttgatgttgttgactatttaaaaatgcttgttcaaactccgcttcttcgatacctaaatcttctagtacttcctgaatttcagactgaatgtaatctagctgagcttcggtaatgtattcaaccgttcttgatgtataatcctctattgtctctctatgttgatctaatgaaattagataacttgataatacttcaagttcattttcagggtgatcaaatttagatacataaaaggtgcgttctaatttaataccccaatctgcaattgatttttcaactcgagatttaaacgtagagaatgacaattcatcgtcttgatgcttgtcaatttgattaatgataaacacaacaggtattccaacatcatttatatgcttcataaacttaaagttaagttcagattgaacgtggttatagtcaaccgtataaaatatcatattacttgtatacatatattgttctgttattgactgatgtgatgcaacatttgaatcaacacctggtgtatcttgcaacgtaaacccattttcaaatttagctgattgaaaattaatttctacagattcaacgtcgacattttggcgattcatttcccttacttcatcataattagataatttggcatacgtttgattcggcaaattagcaataatatcgtgattgtctgaaactgacacaatagcagtattacttgtcgttggtacaggagaacttggtaagatatcttgttcaattaataaatttatcattgtcgatttacctgcagaaaaatgtccaacgaacgaacatgtatattgctgcaaatatactttcttaattacttggttaattgtatgtaaaagtgcttcatttcgcgacttttcaacttctttttttaatttatataaaagatctaattgttctttattaatcatgttactttcccctttggttcgttcacatagaaatgcttgcttgttacaacgaattcatacaatatcgatgtccatttaaacatagatcgttaaatggctcgcattgtattatgtttaaattttatcatagctgcttgataaaacatacgaataatcaattttcttcaaacattccaacttaaaagttcattttttaaaaatcacaaatcatcgttaaatttttctagaaaataaatattgtcacagtttgttcacacacgtcacagaattgacaccgtataatagccaattgggagggaaatatgaaaaatacatttaatccattacaaagattacatttctatgcagcaatatttattgctccactgttaatcactttaaccatttcgggcattggttacttgttctttccagaagttgaaaataatatttataagaatgagttttttggtgacagtgatgtaaaaacgcatcaaacattaaatgatgcagtacatcaagttgaacaacaatatgaaggattctttgtaagtaaagttagcatacttgatgaaccatataacaaacgaattacactgagtgatatggcaggaaatcaacgttacgtctttctagatcataacaatcaatttgttgcagatcaaaatgcgaaacatacgtattctaatgtgatgcgaagtatacatagttctttgtttactgaaaatactattattaattatttagtagagttaaccgcatgttggatgatattcatgattttatctggtacttatttactcattaagaagcatttaatttctaacaaaagtaaggcacttcgttggcaaaagtggcacgcaatgattggagttatcattgcaattccagtatttgtattagtcttaactggattgccatggtctggttttatgggcagtaaaattgccggtatgatggacacaaacggtgaccttggtcaaggtgaattagcgattaatccacctaaatcagatttgaacgaattaccttgggctacacgtaaaaataaacagccagcttcatccgaaaaaggttcaagtggtcatcatggtaatgcagcaatgcctcaaaccaaattagattatcaaatatctattgataaggtcgttgaacaggcgcaaaaagctggtattaaaaagccgttttcaatcgtatatccaagtgataaaaatggtacctttattgtatctaatactagtaattcaggtgttactgggctagatgtatcaccatacaaggaacaaacactttatttcgatcaatatagcggtaaaaagctaggtacgattaaatatgatgactacggtattattgctaaatggtttacatggggcattccgcttcacgaaggtcatttattcggcattttaaataaaatcattaatttatttgtatgtatcgctttattagtagccattggcatggggtttgtctcttggataaagcgtacaaaaaatactgcagtaaaagtaccacatcgcgtaaaaaaaccagcatctatatcactcataatatgtttaattgtattaggattattaatgccattatttggattatcacttatccttgtatttataattgaattaatattatatattaaagatcgtcgtgctaaacaataatgcacttaaagttttgaactgacgaaatttacaaaatgattctcgtctctctaattacttaaaacgggttctataataaatcgtactgatggagcttgggagataaatcaatgtcctagggtctataatattatattggcagtagttgactgaatgaaaatgcgcttgcaacaagcttttttcaactctagtcaggggcccaaacacagagaatttcgaaaagaaattctacaggcaatgcgagttggggtgtgggccccaacacagagaatttcgaaaagaaattctacagacaatgcaagttggggtgggacaacgataaagaaatactttttctatagaaattagtatttcttatgcatgagttttactcatgtattcctatttttaagtacacattagctgtggctaatgtgtaagaaccactacataataaatcattagtggctctttatcatttctgtcccactcccatctgtccgattttttgaatttgaagataaaaaagcatctaaaacgcataagaagataactctacttcttcaaaattacgttatagatgcttttttattaattcatatgcatgtcgtgaattttcatcattaaaccgtgtgggacgtcatcatgtttaacaatctcttgtttataaaatgtcttcccatcatctttagaaactaattttacaaagtctccttttttcggcttgaaatcattagatggttctactttgatattatgtttgactaatccatctttttcacttacaactttttctgcatttgtattactattcatataaccaaaataagtcgttttttgactagaaaaaatcattaaacatacaacggcaataccaataacaatcaatgctatagataaacctagacccatttttttacccatttatagactcctccatttttcaaaaacacctattatcatgagaacataattaatactaattttagtcacgcattagaaacactttagttttcgatagttttacgttctgtctttttaccccagtattgataataagtacattctatatatccattaaataacttacgtcgcttcgttgctttacgatctactaaatattcaaattctttattacttgttaaaatgtatgtagataaaaatggatgttgtttcattagtttaccaatataacggtacatttcttcaacttcttcacgatcaccaatacgttcaccatatggaggatttccaattaacgccaccggttcttctgtatcaattgttaatgtattgacatcttttacactaaatttaataatatcagacaacccaacttcttcagcgttacgcttagcaatctctaccatttctggatcaatatcagaagcatatacttcgatttctttatcataatcagccatcttatccgcttcatcacggtaatcatcataaatatttgctggcatgatgttccattgctctgatacgaactcgcgattaaaaccaggtgcgatattttgagcaattaaacaagcttctatagctattgtacccgaaccgcaaaatggatcaattaaaggtgtatcacctttccagtttgcaagacggattaaacttgctgccaacgtttctttaattggtgcttcaccttgtgctaatctatatccacgtctgttcaaaccagaacctgatgtgtctatagtcaataatacattatcttttaaaatggcaacttcaacagggtatttggcacctgattcatttaaccaacctttttcgttatatgcgcgacgtaatcgttcaacaatagctttcttagttatcgcctgacaatctggcacactatgtagtgttgatttaacgcttctaccttgaactgggaagttaccttctttatcaattatagattcccaagggagcgctttggtttgttcgaataattcgtcaaacgttgttgcgttaaaacgtccaacaacaattttgattcggtctgctgtgcgcaaccataaatttgcctttacaattgcacttgcgtctccttcaaaaaatatacgaccattttcaacatttgtttcatagcctaattcttgaatttccctagcaacaacagcttctaatcccatcggacaaactgcaagtaattgaaacatatatgattctccttttatacaggtattttattcttagcttgtgttttttatacatttccaacaaatttaatcgctgatacattaacgcatccgcttactattttaaaacaaggcagtgtcattatatcaagacaaggcgttaattttaagtgttcttttcatgaaaaaagctctccatcatctaggagagctaaactagtagtgatatttctataagccatgttctgttccatcgtactcatcacgtgcactagtcacactggtactcaggtgataaccatctgtctacaccacttcatttcgcgaagtgtgtctcgtttatacgttgaattccgttaaacaagtgctcctaccaaatttggattgctcactcgaggggtttaccgcgttccaccttttatatttctataaaagctacgtcactgtggcactttcaaattactctatccatatcgaaagacttaggatatttcattgccgtcaaattaatgccttgatttattgtttcatcaagcacgaacactacaatcatctcagactgtgtgagcatggactttcctctatataatatagcgattacccaaaatatcacttttaaaattataacatagtcattattagtaagacagttaaacttttgtatttagtaattatttaccaaatacagctttttctaagtttgaaatacgttttaaaatatctacattatttgaagatgtatttgttgttgtattattcgaagaaaaacttttattgtcctgaggtcttgatgttgctacacgtagtcttaattcttctaattcttttttaagtttatgattctcttctgataattttacaacttcattattcatatcggccattttttgataatcagcaataatgtcatctaaaaatgcatctacttcttctcttctatagccacgagccatcgttttttcaaaatctttttcataaatatcttttgctgataatttcaatgaaacatctgacattttttccacctcattagaaactttgatcttcagaccactgtaagtcattgatgaatgctgttaattcatcgaacgtcacaatatcacaagtatagtttgttttatccataaaatcaactaacatctgcttgaagaacttaggacttgcctcttgttcctcatcataaatgagcaatgtttgatccgaatgttcaagcataaattgatctgcttgtttaaattgaaaaggaccctgatacgacgtatgaaaaatactatcaacataatctgcatgcttaattatgttggcatacttactttgattatgttcattccacttttctgtatgtccttggaacggtgtaattacagcaaactttaacgaatcatatgttcgttgtaattcaataacaacttctgcagtccataattctatacccatttgcccttgtattaacacccattctaatccttcatccaacagttgttcaattttatgttttataaattgttttaaataatgtacttcaggtgcgtcatctttaaaaatgtttaattcgaatgatttgtaacctgttacataaactgttttaaccatcagtaccctcttttgttacgccatctaatatattttgtaaatcatattgaacacttttaagcttttctataaataactttcgacttgttcgcttaaaatgacattcgacagaaagttgttcaatgttagcaatcagtagctcaaatttccttgaattcatataaggtacttctataataaattcacgatgtaatttgatctcattgagcatgctatcaatatgttcagtatatggctttacagtttggtaaaaatcatgatcttgttgttgtgatttcacattttcaaaattttgttgcatgttgttaacttcataaattagtgattcgactaaatcattcatgaggacgcctcctacatttttaatttatcacaatatactgtattcgtcatgttttaacactctatataatttgatttaactattttttcaaatgtgttatctgttaaatcaagtaaatctaaaaacttcctatataaatacaaaattttatcgtgtatgttgttatacgatgaaaatacttttaatctaataaaatcatttaaatcaaatacacctctgctgattaacaacacatacttgtacttgcctcaaaaataataattactgatcatgatttgacttttataacaaaattcaaaaatattgtaatgagtattcatttttataagcaaaacttttcaattaattaaaattgtgtgtaaaattccaacattaacggtaaatgtattataatattattgtgttaatgctgaaatcacgttaaaataagctttggtgtattgtgtctttcgcatttatactaatttaagtttggtgtttcactataatgttgtgtataataaacaacgtttactaccaaacttgtgtggtgaaatttatgaattatccaaatggtaaaccatatcgtaaaaatagtgctatagacggagggaaaaagaccgctgcctttagtaatattgagtatggtggacgtggtatgtcacttgaaaaagatatcgaacattcaaatacgttttatcttaaaagcgacattgcagttattcacaaaaagcctacgccagtacaaatagttaatgtcaactatcctaagcggagtaaagctgtgattaacgaagcttattttcgtacaccttcaacaactgattacaacggcgtttatcaaggttattatattgattttgaagcaaaggaaactaaaaacaagacgtcctttcctttaaataatattcatgaccatcaagtcgaacatatgaaaaatgcatatcaacaaaaaggtattgtgtttttaatgattcgttttaaaacgctagatgaagtttatcttttaccctattcaaaattcgaagtattttggaagagatataaagataatattaaaaagtctataacagttgatgaaatacgaaaaaatggttaccatattccttatcagtatcaaccaagattagactatctaaaagcagttgataagttgatattagatgaaagtgaggaccgcgtatgacggaaaacaaaggatcttctcagcctaagaaaaatggtaataatggtgggaaatccaactcaaaaaagaatagaaatgtgaagagaacgattattaagattattggcttcatgattattgcatttttcgttgttcttttactaggtatcttattgtttgcttattatgcttggaaagcacctgcttttaccgaagctaaattacaagatccgattcctgcaaagatatatgacaagaacggagaacttgttaaaacattagataatggccaaagacatgagcatgtaaatttaaaagacgtgccgaaatcaatgaaagacgcagtacttgcaactgaagacaatcgtttctacgaacatggcgcacttgattataaacgtttattcggtgcaattggtaagaacttgactggtggatttggttctgaaggtgcctcaacattaacacaacaagttgttaaagatgcatttttatcacaacataaatctattggacgtaaagctcaagaagcatacttatcatatcgtttagaacaagagtatagtaaagatgatatcttccaagtatatctaaataaaatttactattctgatggcgtaacaggtattaaagctgctgctaagtattactttaataaagatttaaaagatttaaacttagcggaagaagcttatttagccggtttacctcaggttccaaacaactataatatttatgatcatccaaaagctgctgaagatcgtaaaaacactgttttatacttaatgcattatcataaacgcattacagataaacagtgggaagatgctaagaaaatcgatttaaaagcgaacttagtaaatcgtactgctgaagaacgtcaaaacattgatacaaatcaagattctgagtataattcatacgttaactttgtaaaatctgaattaatgaataataaagcattcaaagatgaaaatttaggtaatgtattacaaagtggtattaaaatttatacaaacatggataaagatgttcaaaaaacattacaaaatgatgttgataatggtagcttctacaagaataaagaccaacaagttggtgcaacgattcttgatagtaaaactggtggtttagttgctatatctggtggacgtgatttcaaagacgtcgttaacagaaaccaagcaacagatcctcaccctactggttcatctttaaaacctttcttagcgtatggacctgccattgaaaatatgaaatgggcaacaaaccatgcgattcaagatgaatcttcatatcaagttgatggttctacatttagaaactatgatacgaagagtcacggtactgtatctatttatgatgctttacgacaaagtttcaatataccagctttaaaagcttggcaatcagttaagcaaaatgctggtaatgatgcacctaagaaattcgctgccaaacttggcttaaactacgaaggcgatattggtccatctgaagtacttggtggttctgcttcagaattctcaccaacacaattagcatcagcatttgctgcaatcgctaacggtggtacttataacaacgcgcattcaattcaaaaagtagttactcgtgatggtgaaacaatcgaatacgatcatactagccataaagcgatgagtgattacactgcatacatgttagctgagatgctaaaaggtacatttaaaccatatggttctgcatatggccatggtgtatctggagtaaatatgggtgctaagacaggtactggtacttacggtgctgaaacttattcacaatataatttacctgataatgcagcgaaagacgtgtggattaacggctttacacctcaatacactatgtcagtgtggatgggcttcagtaaagttaaacaatatggtgaaaactcatttgtgggacatagccaacaagaatatccacagttcttatatgaaaatgtgatgtcaaaaatttcatctagagatggcgaagactttaaacgtcctagctcagtaagtggtagtatcccatcaatcaatgtttctggtagtcaagataacaacactacaaatcgtagtacacacggtggtagtgacacatcagcaaacagcagtggtactgcacaatcaaataacaatactagatctcaacaatctagaaacagcggtggattaacaggtatattcaactaatccacacaacataaaatcctcagttataccatatttatggcgtagctgaggattttttaggttcttcatcttttatggtgggaaggtaaaacttcctgctttttttataagtattcatacgctattgctatattagtagaaaccttaaaatcagtcattcacatacattttgaaacatctaaatagtttttcatattcacatctttagctatttaaaattattgacattgcaaaagtggttgttcccatttttaaaattatgattatttttctcatagtcatcttagacgctgttttaaattgaaatgtttatcaattccctgtgtacgttaatcagtgaaatatcaagatgtttgcaacatattttcacaatcatagatataagaaatccacctacgattcgaaataggtatcttaaagcatatctcaagatatccattatgatgtagatggacagtttttatattaagacgttgtaatgacacgacacctaacataaatacaaatatgtgtgcatgaattagttttatatattttcaacattaggaaatgatcaatcttgtctatacctgcttattctttaaccttgtttgataactagcattcattttaatcaattcagttttaaaggtcttcatttgtcgatagcccataaaatgatatttacgttcaatcatataatcatatctttctttaaaattcattggcacaacaggatattgatttaatttatcaaaatcaatattgccagttatgtcattaacctgcttaaaataatcaataattttactatggtattcatccaagtagggctttgcttcactagaacctaatgtcttatttttggcaaatacatcaatctcttgttctaaattatcaaatacctcttttgtaatatttgtcatgttatcacgcttctttcaaactagctttataacgtttttgtccttctctacaatcttctaatagtggacaaatatcgcatttaggttttcgggctaaacagtggtatcttccaaagaaaatgagttgatgatggctactattccatctatctctaggtatgacagaacataaacggtcttctacctgtctcacattatctttccaacgattaatacctaagcgtttagaaacacgttctacatgcgtatcaacagctaatgaaggttcatcaaatgctacactcatgactacattagcagttttacgtcctacacctgctaaactttctaattccttatgtgtttgtggtatttctccattaaattgatcaatcaaagattgacaaagtttcttaatattcttagctttgttacgatacagaccgatagaacgaatatcattcataagttcttcatcactgactgccaaataatcttcaggcgttttgtattttttaaacagctcagttgttactctatttactagaacgtctgtacattgcgctgacaataatacagcaatagttaattcgaacggattatcatgttttaattcacattctgcatccggaaacatatttgctataacatcaatcatttctaatgcttttttcttacttaccatcaaggttctccccgtttaaccaatcaaatttaggtaccgttttaactgtgtgcgtcattttcggtttattaaatttttctcttatttttctagaatcgtcaattgttttgacattgtttttcttccaattaagtaaaatacgatccatatatttaaagctaagtttattcaaactattcgcctcgtctaatgccgcttgtataattgcactatcgtgtttatcaacatcaatccattgatttaacgtttctatttcatatggagataacggccttgcaaatgtatcctctaaaagtctaaataattgtttaaatttttctttactattttgctctttcgtttccatactttgttgcttcaatatatgacttaatttttcgaaaaaaggatctagattcatatattcggtaaatctaccttcttcatctttttgaacttgtaattctagcaattcacgttgtatcaaattttgaataaccattgtaatatcgcgtggttgcatagttgagcccttctgaagtaattcaattgaaggctgtttatttgatgtttcggaagcataaatcaatttaagcaaaatgactaaatcttgctcatctaaacctaagtcactgtaatggtctaataattctcttcgtatcactacaggtcttgcttttaattgatatttatccatgttcgtgcccccttttaaatttaaccattacttaatagtataaatcattttctttaattttcgactaaaatgcttaatatatttaactagtagcaaacaaattttaaataacagtattttttaacactagattttaacaatgaactttatttataatcagatgaactatttattttccaaatatagttactaaacaaaagttttttcatgattaatataagccgttatcaatcttcattttccaagcataaatcgcccagctattaatataggctggacgattctttttattatcataatatatattttaagtaacgaccctaaaacttatggatataaacggtttaataatcttgggaatggcgctgtttcacgaacgtgttcaacaccagaaatccatgctactgtacgttctaaacctaaaccaaatccacagtgtggcacactaccataacgacgtaagtctaagtagtaactatatgcttcttcgtctaatccatgttctttaacgcgttgttctaacaattctaagtcatccacacgttcagatccaccaataatttcaccgtatccttcaggtgcaattaagtctgcacataatacagtttcttcattttcaggatttggttgcatatagaaaggcttaattttagttggataattagtaataaacaccggtaaatcataatgattagcaatggctgtttcatgtggcgcaccaaaatcttcgccccattcaatatcatcaaagccttctgattttaagaattcaattgcatcatcatatgaaattctagggaatggtgtcgcaactttttcaagttttgatgtatcacgctctaaaattttcaactctagtttacaattttctaaaactgattttacaacatgtgttacatattgttcttgaatttctaaactttcagcatgatttatgaaagccatttccccttcaatcatccagaactcgatcaagtgtctacgtgtttttgatttttcagctctgaaagttggaccaaatgaaaatacttttccgtgtgccattgctgcagcttctaagtataactgaccactttgagataaaaacgcatcttgatcaaagtatttagtatggaataattcacttgtaccttctggcgcacttgctgtcaaaattggtggatcaacctttgtaaatccatctttgttgaaaaattcatacgttgcacgaataacttcatttctaattttcattacagcatgttgttttttagaacgtaaccataaatgacggtgatccattaagaattctgtaccatgatttttaggtgtaatcggatagtcatgcgcttctgaaataacttcaattgatttcacttgcatttcgtatcctaagtcagaacgattatcttctgtaattgtgcctgtaacgtatagagatgattcttgagtaatttctttcgcaagtttgaatacctcttcatcaacttctgatttaactactacgccttgcataaagcctgttccatcacgtaattgtaaaaaggcgattttaccacttgaacgtttatttgttagccaagcaccaattgtaacgtcttggtttaaatgatctttcgcttgtttaatcgttgttttcataaccattctcctatttattttttcgttatacaatactcattcattttaacaaaatccgctttcaagttctagaactagactaaaagataacgtgtaaatggtaatgatttaagcacagatttgaacattaatttatattaagacaatacaatcatcagtttcagacaaaatatataataaagcctcaatattattagtatgaaggttgttttttgtgctaacattcaagtttaattataaaactcaaattttgacgaccaaacaaaaattcttgtaacagaacatagcacatgtcatgtcacaagaattttactttgtatttcactttttctttttttgaatttgtcttaataattttccaaactgttgaatgtcgccttttttctgacgataattttcaagtgtttgttcaaaaaagtttttataattactgtttataagtcgatcatcaaatgaaactattatgccgcgatcattttcacttctaattaatcttccaagtccttgtctaaaacgtgtaactgcatcaggtaatacatattccttgaaagttgaagtgaattcagaatccataagccaatattttgcattatgcttgttcataaacggtaacttcgctatcatcacacatttaataccatttgcttgaaaatcaaaaccttcaaaaaatgttgacgtaccaagcagtatggccttatcaaaattattaaactgttgtactattttataattttggttctgctgttgtgttaatacaacataatcttcaaattctggcaattcatttagcatatcttgtaccatatgcatcattttataactcgtaaataagactaaacattttgatgacgttatagtcgtatattcaataatatagcttacaatcgatgctacatactcatctatatttttatattgataagatgctacatcactcggtataaatacacttgtattttttgcactttgtaacgacgtgttaacttcaaatgtattaaagtgaacatctttgttgaataactgtttaaaagcttcaaacgaatgattaaattttaaagtaccagatataaaaatgagtgatttaaatttttccaatacttgtttcgttaatacatcttttacagcgtaatctttcacatataaacgtattgttgatttttgagataaatttttaatcgaaatgaaactagtatgtccagcttttaaactttgttcgatatttttaaatttatcttttaaatacaacaactgtttccgtaatgatttaactgttttatgactaatgccattgaatatttctagcgttttatttaacttatcgataatcgcatgtaaatccttcaaaatgtcttttgtttcaaaagtaaatacattatggaagcgatgaatatcatcatcataaacatcagaatcattgataatcgtaaatatcgttgagaacaattgctcatttaactcatgaatctcattcatactagccttcaagccaaaaatatcaattggtgcaatatctaatttttccaaaattcgctgcttttccagttgatcaattgcctttaacaatttttcattttcgtttttaccaatcaaaccaagctgatatttaatatcagcataactcaactcatttgtcacttgatttaaggcatagtctggtaagcgatgtgcttcatccactatacaatcatcaaacaattgatatattgaattttcaacatcagaatgaattaaatgtgcatgatttgtaataccaatttgaatgttctgtgcatttcgcttaataaaattataataatgaacatcgtgacgtgccggtacatatgtttcaattttctggtcaaaatacatcttttgaccaccttttaaatttaattcctgtatatctccggacggcgtctctgtaatccaaatcagcaattgcattttcaagatattcacttcgtaattacttgtgtcatcttttaaaatttgactaataagccccaatgaaatgtaatcacttttacttttaatcaatagtgcattaattttaaaattcaacgcttcattcattgctggaatatctttttctaacaattgactttgcagtaatttagtattggtagaaatcatgacatgcttcccagtttcaatattatacatcaaggccgcaagtaaatatgctaatgatttaccactgcctagtgatgcttcaatcattgctttttcactatgcatgagctgatctaatatagtttccgctaaatataattgttgcggtcgatatgttaagccaagttgatctacagctttgctatataaagacttcaagctgccattataatttgttgtcggctttttaaaatcaacttgcttacgatagataatctgttcgaacttttcgtacgatttatccaatggctttgcatcatattgcctaaccatctcaaagaaaatatcatacaaatcgtatttcaactgtttacttaaataatataattgcttcaaagtatctaacggtaacttttcaaatttttcaaaagctaatatcatcaatttagcagtagtagcggcatcttcgtcagctcgatgggcatttgctaaggtaataccatgtgcctctgctaattcacttaattgatagcttttatctgtaggaaaagctattttaaagatttctagtgtatctataacttttttgggacgatattgaatattacaatctttaaatgcctttttaataaaattcaaatcaaaatctacattatgagctacaaaaatgcaatcttttatcttatcgtagatttcttgtgcaacttgattaaaatatggcgcttgttgtagcatattttcttcaatggatgttaacgcttgaatgaacggcggaatctctaaatttgttctaatcatagaatgatatgtatcaataatttggttattgcgcacaaacgttataccaatttgaatgatatcgtcaaaatctaattggttgcctgttgtttccaaatccacaacggcataggttgccatacccatagctatctctccttgctttagtgttaaaaatctatatctgcactaattaaacggtgtgattcacccgcttcatctctaacaattagatagccatcgtaatctaaatcaattgcttgtcctttaaactgtttatcattttctgtaaatagcaacgttctattccaaatattagaagctgcaatatattcttcacgaatttcagaaaaaggtaacgttaaaaattgattatatcttttttcaatttcttgaagtaatctctctaaaaattgatatctatctaatttatttttatcatgtaattgtacacttgttgctctatgtctaatactttcatcaaagttttctagttgttgcgtcaaattaatacctataccacatattattgcttctataccatcattattagcaaccatttcagttaagaaaccacacactttaccattatcaatatatatatcattcggccatttcactttgacttcatcttgactaaaatgttgaatcgcatctcttatccctaatgcaataaataaattaaatttagatatcattgagaatgcaacgttaggtcttaacacgacagacatccaaagtccttgcccttttgaagaactccaatgtctattaaatcgcccacgacctttcgtttgttcatcactcaagataaaaaatgaagattgatttccaacaagtgactttttcgcagcaagttgtgtagaatctattgaatcgtatacttcactaaaatcaaacaaagcagaactttttgtatattggtctattataccttgataccaaatatctgggagctgttgtaataaatgccctttatgatttactgaatctattttacatccctctaactttaattggtcaatcactttttttactgcagtgcgcgatatattaagtgattccgcaatgctttgtccagatatataattcggtttatttttatagagtaattgaagtacatcttgactatattttgacatgattatccacccatttcaaaatttcagtttcttcgttgcttactttacctgttacaatcgctatctcaatttgtcttagcacatcttttaaccacggaccacttttggcatttaaatgtgccataagtacaccgccattaaccatcatgtcttttctattatgcataggtaaacgatgtaatgtttcatcaatcgtttgaaggttaacgattaatggttcatgtccttgaatatcatttgcctttatcacgtctgctgcaaccattacatttttaatgagatgcgtatcataatcataaacaaacatttttaattgttcttttgtaataatacttggtaatgcattcataatttgaatatattgattgatatcttttacttgtcggttacttagctttaaaggcttcaatgagtaattaatatcaaatttaactgatactatagcaatcaacaattctaaatcaattgcttcagttacattaatttgattcatatcaagatgttcgaaatacggcatataattaaatgctttcagcgattttaaatgattaaaactcttttcaacattaatacctcgcattaatttagttagttcaatcactatacgctcaattgataaaaatttaatatctgccatttgtatacgcatcgcttcgaatgtttccgttgcaatatcaaatgataattgtgactggaaccttaaacatcgaatcatacgtaaagcatcttcttggaatcgttcctcagctatacctacagttcttattattcgattattaatatcttgttgaccatcaaaataatcatacaatttgtatgctgtatccattgctatcgcattcatcgtgaaatctcgtcgttgcaaatcttcgtataaatcacgaacaaatgtaacaccacttggtctacggtgatcgacataatcttcttcagcccggaatgttgtcacttcataattttcatcattaaaaactacatttatcgtgccatgttctttacctacaggtatcgtatgactaaagatagattctatttcatccggcgttgcacttgttgtgatatctatatcatgaatatttcttcccatgacataatctcttacagagccacctacataatatgcttcaaaaccattgtcttgaatttgttctaatataggccttgcctgttcaaataatgatttatccatattattactcgcctttacttttgttatgctcatttagcattttttgataataatactcatattgatctgtaataagttctgatccaaaacgttcagcaatatctgctagcatgtttttctgaagtttgttgtataacaccttatcttcaagtaatcggatagcatagtcactcgctgaatcacaatcacccacatctacgacaaatccagtttcaccatgtttaataacctctttaattccaccggcatttgaaccaattggaacgacgcctgttttcatagcctcaagtaaagttagtccaaagctttctttttcacttaataataatactaagtcagataattggtaaaattcacttacgcaatcttgtttccctaaaaataaaacatcctcttctacgtttaactctttcgtcaattgacgcattggcactaattcaggaccatctccaagtaaaattaatttactaggtatcttttcacgtacttttgcaaatgtttctataatagtatctatgcgttttacttgtctaaaattcgatacatgtattaacactttttcatctggtgctataccaaattgtgattttaatgctgtgttatgtttagttggaaactcattttcacgtacaaaattataaatcggtataatttctttgttagtttcaataatttcatgtgtttcttgtgctaaagatttactcacacttgtcacaatatcacttttttcaatgccaaatttaattgcaccttggagtgaatgatcatagcccaaaacagtaatatcagtaccgtgtagcgttgtcataatttttatatctttacctgacatctcacgagctaaaatcccacaaattgcatgaggtacagcatagtgcatatgcaacaaatcaagaccatattctttaataacttcagcgattttagtacttaacgtaatatcatacggtggatactgaaatactgcatattgattcacttcaacttgatgaaaaatcatattcggtaatggttttcttattctaaacgggatatttgaagtgataaaatgtacttcgtgacctcgctctgctaatttaattcctaattctgtggcaataattccagaaccacccatggacgggtaacatgttatacctatcttcattcgcttgcccatcctttctttctatttctctctattattctcgatgcgtagataattgtttaaatttaagtttatagtaatgttgagtttataatttcaaatatctaaaaaacaggtgttgtatatatattcatttatctagttatatttactttaaaaataatatgatttcatgcgatgcaattcattgatggatgtttttaatcttaatcaaatccaaataaagcatatatttttatattcactttctttcgaatcgatttttatctcttgtattaaacttttccatagtttcattaaagctctctgtcatatctattcccattgaattcgctaaacataacaacacaaataaattatcacctaattctgctttaatcgtatttgcttcctctgaatctttcttctttttttcaccataggtatgatttatttcacgtgcaagttcgcccacttcttcagtcaatctagctaagttagctaatggtgaaaaatatcctgttttaaattgtccaatatattcatcaacttcacgttgcatttctaccattgatttcatttctacgttctccttatattgcatttctaatatagtatatatcaatttgaagtctcatgcatgtttagtgcaatctactgactctagctaaactagatgacaagttgtttattttagaagtttaataattcagtttatataaatgtaatgcattcctaactaaattaaatcaattgaaaatgggattataactttatgatacgtactactacaataaaataatatagtgaataatctaccattagaaaaataagcacaaaaaaactagcaaccacacaaaatgtgattagctagttaataagtgtctaatttaagttaattgttaatctataagattaatcacttgaacgcgcaagcaaaatgatacgtacaagctctgctacagcgacagcagttgctgcaacataagtcattgctgctgcagataatactttacgcgcatgcttgtattctttttcatttacaatgttcaatgccgtaatttgtttcatcgctcttgaactcgcatcaaactcaactggtaacgtaacaattgagaataataccgctaatgacattaaaccagcaccaatccataaagcagttgaaccaaatgcactacctatcgctgttaagataatacctaacatgatgatcatataacttaatgaactccctaggtttgcaacaggtactaatgctgctctgaatcttaagaaccaatatccttggtgatcttgaatggcatgaccaacttcgtgggctgcaattgcagttccagcaactgatggtctgtcatagtttgcaggagatagtgaaacaactttctttttaggatcgtaatgatctgttaagaatccttcacctttaacaacttcgacatcataaataccgtttgcatgtaaaatttctaatgcaacttcacgacccgttttaccactagttgatctaacttgtgaatatttctcatagttagatttaactttgtgttgtgcccataaaggaagcaccattaatattacgaaataaattatcatagtaaaaattgaagacaataaactcactctcctttataaatattttactgtcatttgccgtttttatcaaatcatttacactttaataatttgtttaattcaatataaagcaaaagtccaaaaacactcagacaacatgataatacaccaatttgccacacatgtgtagttataaaatcataatatggaaattgaaggtgaaaatagtcaatataatcattcaaaaatacccaagtcatcgctacactgattccaatcatagaacgtttaaacctaggatagaagtaaattgcctgaacggccattatactgtgggaaaacattaatatcaggccatttactgtaatatcaccttgttcaataataaataatatattcataataactgcccaaatcccatatttgaataatgttacaaatgccagtgcatcgataatactattttgtttttggattaatatcattgagatagaaataactaagaataatattgcagttgggctatctggaacaaaaatcttaaaatgccacggcgtatgacttaattgttcaccataccatatataaccataaatcatccctaatatattacaaatgagtagcatcattaaccaagaacgttgataaagtgtatattgccaaaatgtattaatcgtcatctgctaagtcctcaaattgattatgtttatttactagcttgagtgtatttaaaatttgcgttagttgataaaaacgttgcttttcattcatctgtaaacttaaatcaatattgtgtaacaagtaatctattaataacgcatgtttatgccgatctatagccatactatttaagtcatgaagataagtttgataactgggcgattccgttagttgagcaactattaaatcatctagcctttgctcacgctttgacacgtttgcgaagtgaatttgaatatcaaaagcacagttatgattagcgatataatcaaatatttcatttgtattcattaactttatattacgcttagtaaattgaattgcagaagcgtgacttcccacttctgcaatttctaatgtttcatgatgattaatttttgtatctacaaaatgaatgtttgccaatttcgcctcattcacttttatatagttaagcacccaaactgcaatacgcgacttaaatcgatattgaaaaagtaaatattcaataaaactttctttaatttgattgagtgtctctgacatcaaataccccattttaagattgcaatcttgataattcgtcatgccaattttcgttacttggctctagttccaacaattgatttaaaatagtaattgcttgttccttttgaccaatttcagttaaatagaaataataatcactcataaaatcaatatttgttttcatcgttggatatgctaattcaaagaaatgttgagcttctttatctcgctcttcttgaccataggcgaacgctaaatgccacatgaatgtaggatccaaatcttcttcatctacatatgttaataattcaatgattgcttcataatcttcttcattacgatataaatcgcttaaaatcaataaaggttcttggtaagcattatcaacctctaatgcttgtcttaacaataatacaccttcattagcatcgccgtgttctatttccaaacatccagttgtatacattaactctttataaaattgacttagtcgtaatccttctttacccgtctcaatggcatctggataatttttttcattttcatataatgattgtaaatacaagtagccttgaatataatcaggatctttagaaagtaatgtagtcattattttaattgcttcttgagtgatgtcatttttatcgtaagaaatggcttttttgagataatcttctgaagtcatttcatcttcattaatttcatcgtataagcgaatcgcatcactatagttaccactttgtaaactacaatctgccatacgagagaataagtttacaccattaacttgatattcaccagtttctaaaacggtttcgtattcagaggtagcacgtaaatattgaccatcataatataacatttcagccaatgcaaaatggattattggatcatttggctctagttcaagtgcttcttgtaatttagcaatagcaacttccatcatattaatttgttgatataaatctgcttctaacatcaacttttcaggtgatggttcaacataacttaaatattctaacgcttcgtcagtttgattttcagacattaaaccttcaataaaataaatcagcaattcactttcgtctggatatttgtgatataacacgcgaaatacttccaaaccttgtggcattaatccaaaattgtaaagtgtctctcctagaataaataatgcgtcatcgttgtcagtagttattgcttcattaacacgagagtctaaattttctagtttttgtagattgatatcgtctattaatttatagatatcttccattttatattatccctcattttctaaaagctttagttttggtaaaaatcctggaaatgatacatttacagcatcaaattgtttgattttgacaggctcgcttgaaagtagagaagcaactgcaagcatcattcctattcgatgatcagttaaactatcaactgttgcatttgttttaaattctgacggatgaataatcaatccatcattagttggttgtaattcaaaccctaacaagtttaacatatcagccgttgtatcaattctatttgtttcttttacttttaattcctcggcatctttaattgtactcgtgccaactgcttgtgtacaaagtaatgctattacaggcagttcatcaattgcttttggaactaattctccttcgattgttattggttgaagcattggtgtgtattgaatacgaatagaagcagtaggttcagcaccagttgtttgattgaaaagttggatattaccgcccattttttcaacaatatcaataatacctgaacgtgttggattgattccaacattatgaattgttacatcacttcctggtgtgataagtgctgcaacaataaagaacgctgcagatgaaatatcgccaggaacatgaaaatctgcaggtttaatgtatcgaattgcttcaggggttgtattaattgataacccttctgcttcaattggaatattaaaatgtttgaacatcgtctcagtatgatttcgacttacatctaattctttaatgatggtcggttccttagaaaacaaacttgcaaataaaatggcactttttacttgtgcacttgcaacttccatttgataatttataccttttatgacagatggcttaataattaatggtgtataattatcttcaataccttcaatattcgcatccataagtttcaatggtctcaagacacgatccattggccttttaccaattgaaacatcgccagacaaaacactttcaatacctaaaccacttaacaaacctgccaataatcgtgttgtcgtaccagaattacctgtatacaatacttgatgtggcgtgttaaaagattgatatcctggggaagtcacaactaatttttcatcatcttctttgatttctacacctaacagtcggaaaatgtccatcgtacgacgacaatcttcgccaagtagtggcttatatatagtagatacaccttcagctagcgacgccaacatgattgcacggtgtgtcattgacttatcgcccggcacttctatttcgccctttaacggacctgaaatatcaatgatttgttcatttaccatttcattcacctacttaaaatatgtttttaattgttcacatgcatgttgtaatgttagttgatcaacatgttgtacaacgatatctccaaattgtctaatcaagaccatttgtacaccttgcttatcattctttttatcacttagcatatattcgtataacgtttcaaaatccaagtcagttatcatgtctaaaggataaccgagttgtattaaatattgaatataatgattaatttcatgcttagaatcaaacaaagcattcgcaactataaattgatagataatgccaaccatcactgcatgaccatgaggtattttatgatagtattcaacagcatgcccaaatgtatgacctaaatttaaaaatttacgtacaccttgttctttttcatctgcaacaacaatatccagcttcgtttcaatacctttagcaatatatttatccataccatttaatgactgtaatatctctctatctttaaagtgctgttcgatttcttgcgtcgttgattcaccattcaataacgcatgcttataaacttctgcatagccacttaatatttgctcaaatggtaacgtctttaaaaagtctaaatcataaatcacagcagttggacgataaaatgcaccgataaggtttttaccttgttttgagttaatacccactttaccgccaacactagaatcatgcgccaaaatcgttgtaggaacttgtataaaatggacacctcttaatagtgttgctgctacaaatcctgcaaaatcaccagttgcaccaccaccaacagcaataattgctgtattacgagtcacatgatgggataaaatatactctaatgtttcttgatattgatgaaatgtttttgtcttttcacctgctggaataatgactttatgcacattttcatatgataaaatatcatcaaatttattcgcaaaatattgatttacatattcatcaattaatataaaactttgatcaaactgatcaatatacgtgctaatatggtcaattgcaccgcgttcaacatatattggataattatttgaagggtatgttgtttgtaatttcatgattacacctcaattgttcttgttgttaaaactcaatatttaattgtctgcgctcaataatttgttgtttaagttgctcaatatgatttgattggaattcttccaataatgctttcgcaatttcaaatgctacgacatgttcgcagacgatacttgctgcaggaacagcacaactatcagaacgttcaattgttgctttaaagtcttctttagtattaatgtctactgaatttaatggtttatataacgttggaattggtttcattacaccattaacgataattggcattccatttgacataccgccttctaaaccacctaagtgatttgacccacgataatagcccaattcagtattgtagagaatttcgtcttgaatttcgctaccaggcttttcagctgctttaaatccttctccaaaacttacacctttaaatgcattaatactaacgacaccctgtgctattcttccatctaatttacgatcataatgtacataactacctacaccaacaggcatattttcaactacaacttgaactactccccctattgaatcaccatcgtttttagcttcgtcaattttatctcgcattgcttgtgcgatactgtcatcaattacacgaacatcattacgatcaagatttgctttaaatgtttttgaatcataaaaatctttatctttaattccacctatttcaacaacacgactgtatatatcgatatctaactgttgtaataacactttacataaggcaccgactgcaactcgagctgctgtttctctagcagatgatcgctctagcacatttcgtaaatcacgatgattatatttcatacctccaaccaaatctgcatgaccaggtcttggttttgtaatagtacgtttcatattttcacgttcttcttcacttattggagctgctcccataatttttctccaatgcgtaaagtcatcattggttacaaccatagtaattggactacctaatgtataaccatttctaacgcctgatactatttctactgtatctttctcaatttgcatgcgtcggccacgaccataaccaccttgacgcttgaacatttctttattaatatcttcaactttaatttctaaatttgctggtataccttcgacaataactgttaattgaggtccatgtgattctccagaagttagatatctcatacacactcgctcctttcatacttccgcaataacattataatatgttgttaatcttatcacattcattgtggattcataaatgtttgttttcaagcttaattaagaaaatggatgacatctcattttaaatgtcagaattatcttaatattaaacgaactaaaattaattataatatattcgtctgtagaaaagtatcatgaatttctaaacagttgcatcatataatcattaattaaaaatgattagccgttttaaaataatcgtatcgcaactttagcaaataatatactgactacatttcttaatacaaaagaacgaactgttaattattaataaagttaatcagtccgtttaaaaaaaattatgatattaaaaatatacatatgttaagcgcttttgttatactttgacttcaaaaatataatcaattcttttactaatacataaaaaatataaatgagagtcagtataaaaataatttttgttataggattaagtggtttatctaaaaatatagcaccatatagtaattccattaattttaagaacattaaaatccccaaaataatcgaaataatattcttcattttaacaaccccttctctctgtttagtttcatttgataaagaatattcctctctttttaatacgtgttaccaaaaaaactataaaatttttcaagtaatttactacaacataaaaaacgggccttgttatgtataatcataatgactaaccacataacaaaaccctttctacctttataaataaatcgtaaaggtttacagtttaaattttattcatataaccatgcatcacgtggtgaagcatagctagtaatttcattttcattaaaccatagattaatttcacgttcagcagaatctaatgaatctgaaccgtgaatgatatttctaccaacagttaaacctaaatcacctctaattgatcctggtgaagcttctgaaggattggtgctgccaataatatgtctagatacattaactgcatcttcaccttcaactaccattgcgaacactggtgctgatgtaataaatgaaattaaatcattataaaatggtttaccttggtgttcaccataatgtgtttcagcaagttccattggtacttgcattaatttaccaccgacaagttttagtccttttctttcaattcttgaaattacttcaccaattagatttctttgtactgcatctggtttaatcattaaaaatgtacgttccactttatgtatccccctgtgtttaataggtttatgtatattactattatatattaacaggttggtaaagcgctttcaatacttttcataaatactacgtgtttcttgaacccatttttttcgtcaaacttaaaagtagtgatttcggatgtccatctggtaactcagaaatcaaatccaaagctttacttaaatacttcgaacttactgctttagattcattaatactgtcagactttctaataatttgaatacattcttcaaattcttttcgatcgctgtcacgtcgtaattgctcaattttcaatttgaagtctgggtttttacgcatttctaataaaatcggtaacgtaatatgaccattaagcaaatcacttccgaccggcttacctaatttcttttcggtacttgtgaagtctaatacatcatcaatgatttggaagctcatacctatataatgaccaatcattttcaattttcgtacagtctctttatcagattgagatgtaattgcaccaacttcagttgatatttgaattaacagtgctgttttgcgattgatacgtcgtaaataattgataattgtctgttgactgttaaattggtcttgaaattggaaaagttcccctctacaaacatcaacgatagattcagatatcaattgatgtacacgattatctttaacggccattaagtgttcaagtcctaatgccaataaaaaattcccagttaaaatagcagttgtctgatcccatttctttgatatggttaacttgcctcgacgcttgtcgcttttatcaataacgtcatcatgaacaagtgttgccatatgaattaactctaatgcgactgcaacttgatacgtttgttcagacgtttgttcatctttgccaaattggctactcagaattacaaatgctgggcgtactcttttaccaccagaagacaataagtgtaatgatgcctgttctaatacagaatctttactttttattgccttttcaagtcgttgttccactttcttaatttcattgttcatgtttaactttgccacgttaatcacctttggtattatctttttctttatagccaaggtgcattgcagcaacgccccctgtaaaactacgtactcttacatttatgaaacccgcttcttcaaacatgcgcttcaactcttcttttccaggaaaattaaacgtagattgctgtaaccattcatattcttcttttgattttgcaaataatttcccaaaaataggcataacaaatttaaagtataatgcatacatttgtttaaagactggcaaagttggttggctcgtttcaagacataccaccataccacctggtttaagtactctattcatttcttttaacgcgactaaatagtctggcacattccttaatccaaacccaattgttacataatcaaaagaattgtcttcaaacggcaattccattgcatcaccatgaacaagtttaacattttccattgaagcagttttttcttttcctacttctaacatattctcactaaagtcaataccagtaacttcacctgttggtcctacagctttgcttaatgcgattgtccaatcaccagtaccacaacaaacatctaatgctttcgtcccttttctaacgcccatgtctttcatgacgcgttttctccatactttatgctgctcaaaactaataatattatttaatctatcatatttttttgaaatattttgaaaaacgcgatgtacttgctctttatttgctttattgtcagccatgcttaattacctctactttttaaataacttttttggatatcgtgtaagtaatgctttacttcactttgattatatttcttgaagtatgatggatagtaatcagacatatcttcaaataaataattatatatttccgactcatcaatattgataccgaaatgagataacgtaatatatgggaaaagtgtttcaatttttactattgcttgagaaatttcataatcatttaaagcttgatgatgtaatgaagatttcaattcattaatttcaacaattgctttactaatttcattttgaaatgataaatcattgatttctgctagtagcgtataaaaatgtgcactaattaaatctccaatcaaaatggaatgtttagacaaatgattatatgtaatgtcatcaaggtgtctcattgatgtgtcaattgtgaggcatgctactttggcaacatctggaatatcatatgaatcaagtaacttacctaaccgatgattaatattaatggattcatattctgatacaccctttaatctttcttctatttgtctttccaatttgctaacagttgtttccatgtctacacctcacgatattatcactattcatattaacattatatgtaagaaattaaaatcttttgaagcattaagattacttatcatttttaaatttcaatttaaactaacagtaatttatgtagcttttgtaattctcataataacctttacttcatttacattattcatctttttaaataacataaaatactatagtagacatggttaccttttaagtaaattcaacgctaacaattaatctcattattcatatgtatattttgtagttgctatttttatcaaaactattatgtcatgtaaaattttgaacgcttaaacaatgaatgttccaaagattaaaaacttagaagaacattacaatttatgtacaggttgtaagtattaaaagcaaaataaaaagcccttattcagggctttttaagtaaaattattttacagcatcttttaatgctttaccagctttgaatgctggaactttacttgctgggatatcaatttctttaccagtttgagggttacgacctttacgtgcagcacgttcacgtacctcaaagttaccgaaaccaattaattgtactttttcacctttagcaagtgagttttggattgattcgaatacagcatctactgctgaaccagcttcttttttagttaaatcagcttgctctgcaactgcattgattaaatctgttttgttcattagacattcacctcctgaggtttgataatgatatgtttatatcattatggtaaaactttaacacaagcattacataaatcgcaattatttatgtggcaaaaacgttgaatttaagccatttctattcattttacgtaattattagccgtatatgtgtaataatacacattttattcagattttttatcgcgctccattaaatcttttacgcattcttttactgagatattttcaaataatactctatataatgcatttgtaattggcatatccacatttttttctttagctaaatgataaactgatttagttgtataaataccttcaacgaccatattcatttcagataatgcttgatccattgattcaccttgtccaagtttatatcctaatgtgaaatttcgagaatgtgttgatgtgcaagtaacgattaagtcaccgataccacctaaacctagaaatgtcataggatcggcacctaacttttcacctaatctactaatttccgctaaaccacgagtcattaatgcagcttttgcattatcaccgtagccaattccagctacgataccacttgctactgcgatgatatttttcaatgcaccaccaagttcaacaccaatcaagtcatcattcgtgtacacacgcaaataatcattcataaataaatcttgcgttaatttacttacacttttatcttttgatgaagcagcaactgtagttggttgcttgactacaacttcttccgcatgacttggccctgacaacacgccaatacctgcattatattcaggtgaaatagaatcttcaatcatttctgacacacgtttaaacgtcccattttcaatacctttagcaacatgtataaaagtctttttagaggtcagcttatcattaatttgagaagcaacttctcgcattgctttagtaggtaaagccattaagtaaatatctgcaaattgaattgctttggtcatatctgaagtagcgatgatgttaacatctaatttcgcgtattttaaatactttttatttgtatgacatgtatttaattcatcaacagcatcttgatttttaccccacatcaaaacatcatgtccattttctgcaagaacattggcaagggctgtcccaaaacttcccataccaaaaacggtaattttagtcattgttatcccccaatcgttaatttctctttcgagctataatatgaattggtgtaccttcaaaaccaaaagcggcacggatttgattctctaaatagcgtttataagaaaaatgcattaattctacatcattaacaaatacaacaaatgtcggtggttctatagcaacttgtgttgcataaaagacattcaaacgtctacctttgtctgttggtgtagggttcatggaaattgcatcagtaacaacttcatttaaagttgaactttgaacacgttttttatggttttcacttgcttcattgatgtaagggaataatgtacgtaatcttgtgcgttctttagcagacacaaaagcaatttgtgcataatctaaaaattggaattctttacgtacttcatcttcaaatttcttcatcgttttactatctttttccacagtatcccatttatttacgacaatcacgactgctttaccttgttcatgtgcatatcctgcaacacgtttatcttgttcaatgatgccttgttctgcatctatgaccactaaaacaacatttgaacgttcaatcgcttttaaagctcttaatactgaatatttctcagttgattcatatacttttccttttttacgcataccagcagtatcgattaaaacataatcttgtccatcataactatactctgtatcaatagcgtctctcgttgtccctgcaacattagaaacgataacgcgatcttcacctaaaatagcatttactaaacttgatttacctacgtttggtcgtccaataatggatagtcgaattgtatcttcatcataaggatcttcttcctcttcaccaaaatgagaaacaactgcatctaacaagtcaccaagacctaaaccatgtgaccctgatatcggatacggttcaccaaatcctaatgaatagaaatcatacacgtctgtacgcatttccatattatctactttgttaaccgctaatacgaccggttttttagatttgtataaaatttgagcgaccatttcatcgctttgtgtcaatccttcacgcacgttaaccataaaaataataacatccgcttcatctatggcgatttctgcctgcgctctaatttgtgtttggaatggtgcatcaccaatttcaataccacctgtatcaataatattgaaatcatgtgttaaccattcacctgaagaataaatacgatctcgtgttacacctggcgtgtcttccacaatcgaaacacgttctccaactattctattaaaaattgtagatttacctacattaggcctacctacaatagctactataggtttagtcataagctaacttcctctctttcttatatctttttaataatatcacatgagactgtgtattcaaaatgagtttattactgtaatgataaaaatcagcacttaaaactttatctttttaaacacttagttaaatttgtccacgttatcattccgagtatattttgttacataaaaatactccacatgcaatcataaacatgtggagttgactattaaatattaaattatagtttaagatttttaagtttatcaccaatcatatcgccaattgttggattatcttcttcttcgttttctaagtacgccttagtcgtagaaggatcactttcaacaacatcttcgtttggtaatgttgctttaatagatagtgatactctttcattctcttcatcaatacctaatattttaacatttacttgttgaccaggttctaacacttcacctggcgtaccaatgtgtttgtgtgcaatttcagaaatatgtacaagtccttgtacacctggtgcaatttcaacaaatgcaccaaagtttgccaatcttactacgacaccttcaatgacatcattttcgtggaattgacctttaatattttcgaaaggtgttggtaacgtatctttgattgataatgaaatacgttctgtatctctatcaatagatttaattttaactttaacatcttgaccaattgaaactacttcttctggtgtttgaacatgttcgtgagaaagttcagatacatgcactaaaccatcaacaccgccaatgtctataaatgcaccaaattgagttaaacgcgctactttaccatcaataacatcgccttcatttaaagattgtaataattgatcttttttagcatcgttttcttcttgttcaactgctttacggcttaaaatgactctattattttcaggatccaattcttcaactttaatacgaattgtttgtccatcaaacacagagaaatcctcaatgaagtctgttgaaattagtgaagccggaacaaaacctctttgtcctacatcaacaaccaaaccacctttaactacttctgttactttcgcttcgatgatttcattattatctaatttttcttgtaaataactataagacttctcagtttcaagttgtcttctagataagatgtaagctccagtttcattttcttcatcaaactcaactttagtgacatatgcttcaacttcgtcgccctcttttacaacttcacttgggctatcaatatgatgcgtagatagttgactaataggaataatcccattaaatttaccaccgttgatatgaacaacaacttgcttgtcttcaacttgttgtacctcgccagtgactttgtcaccttctttaatatcgttaatcattgattcattgaattcttcagtcatcttgtttgcctccttatacactacatatttataacatcttataaactgacagaattgtcaagaaattctacctcgattacattttgcgaaatagtcatatacataaatatgtcactttatcatattcaagtcgtcatatcgataaatatttattacaaccatttttgtatcaaagtaatacagtttgctatgtttatacatattttttgtataaaaattagcatagcttactattttgttttataagtctgtcatttcattgttctctacaagatatattatagtaaaattttatacttttataaaacaaaaagccacgtaattgagaaacttttacattttgttagtaagaagtgtgtatattaggcatcattctttaatcattatatttgttaatcgtaataataagtcattgctaaatagcactttaatattgatgtattttaaagcatctctttaattttaaaaaagtaaatttaaataacatgctattttagcttttttgttaatacaattcataggttgtttataaatcagttgaattactaatatgcttggtttaattacgcacttttatttctagtattatcgttattcgtttataaattaacaaaagaccatttctattcgattagaataaaaacagccttttccgttcatcaagtaattataaattttattaatgttagcttcttaattatttaatttgactcaccatcgctaaaatttcgtcagtaacttcttcaatcgacttgcctgtcgtatctaatgtcactgcatcatctgcttttcttaatggtgatatttcacggttcatgtcatattgatcacgagcttcaatatcacgttttaaatcttcaaaatttgattcgatacctcttaattgattatctttatatcttctttctgctcgctcttcaactgatgcaatcatatatacttttaaatctgcatctggtagcactacagttccgatatcgcgaccatccattacgatacctttttctgcagctaactctttttgttttttaacggcgaatgaacgtactggctctttagatgcaacgtatgaaacatgttgcgtcacatcattatttcttaaaaagtctgttacatcttcgttatctaaaatgacacattgacctttatctgctttataagttaaatctaatgttgtttggtcaactagttttgcaaagtcctcagttttgtttaattttaaatatttgtatgttaatgcacgatacattgctcctgtatcgacataaatcattgatagttcgctggctacacgtttcgcaattgtactttttccggcagcagctggaccatctaatgcaatattaatggctttcatgcgtcatttcccttccttgtcgttttatgaataatattttatcataattaggtaaattaaatataggaggaaatatatgaaacatctacttgttattcatactggtggcaccattagtatgtcacaagaccaatctaataaagtagtaacaaatgataccaaccctatttcaatgcatcaagatgtcataaatcaatatgcacaaatagatgaattaaatccttttaatgtaccatcacctcatatgacaatccaacatgttaaacaattaaaggatattattttagaagcagtaacaaataaatattatgatggtttcgttatcacgcatggtaccgatacgttagaagaaactgcctttttacttgatttaatattaggtatcgagcaacctgttgttattactggcgcaatgcgctcgtctaatgaaattggttctgacggattatataattatatttccgctattcgcgttgcctctgatgaaaaggcccgtcataaaggcgtgatggttgtatttaatgatgaaattcatacggcgcgtaatgttaccaaaacacatacgtctaatacaaacacatttcaaagtccaaatcatggtccgctaggtgtattgacaaaggatcgtgtgcaattccatcatatgccatatcgccaacaagcattggaaaatgtcaatgacaaactaaatgtaccattagtaaaagcatatatgggtatgccaggtgacatttttagtttttatagtcgagaaggtatcgatggtatggttattgaagcgttaggacaaggcaacatacctccaagcgcattagaaggcattcaacaattagtatctttaaatatacctattgtgctagtttcacgttcctttaatggtattgtgagtccaacttacgcatacgatggtggtggttaccaactcgcacaacaaggttttattttttctaacggtttgaatggtccaaaagcaagattaaaattattagttgcgttaagcaacaatttagataaagctgaaatcaaatcatattttgaattataatgattacgtaacataaaaaggtctatgtacaatcattagtcatcaacctcatttgacatatcatgaatgtcagtcgttgtataactaagatatttagtacatagacctttatttttatgattctaacggcgtttgtttcttagctagcatgctttgagcaataatgccaccgtggaatttaccattttcaataaaaatggtattcgcatcattccctgcagcaatcacacctgcaatgtagcaattttcgatatttgtttcgtatgtctctttattatacataggcgctgttccaaattcatttgtattaatttgaatacctacagattttaaaaattcataatcgggatgataaccaatcatcgcaaaaacataatcattgtgtatcgttttactttcaccatttacttcataagtcacagtatcttcagttatttgggtaacattagcattaaattccatgtcaattttttcatgatttactaatgctgtgaaatttggaagtatccacggtttaattgaaggcgaataatctccaccacgatatagaaccgtcacgttagcaccagctttttccaactccaaagcagcatcgatagccgaattcttaccaccaataataacaacatcttgatcaaaatacggatgtgcctctttaaaataatggaacactttaggtaaatccgcaccttcaacctctaatgtattatgctgaccataatagcctgtcgcgattgttaaaaatcgacattcataaacatctttcgtcgtagtaattgtaaatttattattcatttttttaacagttaatacttcttcaaatgcatttacttttaattgatgatgttttacaacttctcggtaataaactagcgcttgattacgtcttggtttactttcttcaacgataaacggtacgtccccaatacttaatttatcacttgatgagaaaaatgtttggtgagtaggataattatatattgattcaacgacattacccttttcaataattaaggtatcaataccttttcttttttgttcaatagccgcacttaatccgcatggccctccaccaattatgatactttcaactttttgcattgtttcggcctcctttaatcccaaactattataacagttcagtgattgatgcgctaagtctgtgcttgaagatttatgatatattttcgacaatttgtttaatatgcatagagaattgttagctacggagttgaataacactacaatttaatatgttgatttattttttattcttcctcgttaaatttgttgattgtggtgttttatctttttgatgactatgtaaaaaatttaattgatatgccaatattcgagacaacaccttgttaaataacaaactttgaaaaatgaaaaaaccgctacatacttataagcgcaatttaagttctccaaaatatttagagatacttttaatatgcacgtttgtatatagcagttcagttacaatttatatagttatattatggaataacgatttgttgaccgtttctaatattgttaccacttaaaccattggcacgtctaattttttcaacattttccggtgaacctgaaccgtagtattgaattgcgatacggtataagttttcttgaccattcactgtatgtctttggccaccaccttgacgttgttgttgctgttgttgattttgattagcttgttgttgattttgattattttgtgcttgattgttcgcttgattagcgttgttttgatcattatcagattcatctttagtcgctttgtcttgatcctcttttgatttatcactgtctgtagattttgatttatctttagaagcgtctttagatgtgtctttgtctttactttcatcagcattatttttatttgtattcgcgattttattttcttttgtaccattattatgattgtttaatgccatgcctccaaatatcgctaatgcaccgataattagtacagctgcaattaatggtaacaatactttggccatgccaccttttttacgttctttatctctgtcatgattgtcatgttcatcatggttttggcttgcattattagaggcatgtggttttgaagcggcagaagcacttttacttgctgcgcctccagccaaacctgctgttccagcaccgatcgctgcaccttttttgccattatgatgatctttagacttatcttgagacactttatcctcagtcgagttattcgacttgtcagaattacttttgttttgagcgtcatttgaatgtttcttagctttagaaacacccattgcaccagctgcacctgcaacacccgctgttccagcaccaattgctgcgccttttttaccactatgatgatctttagattcatctttgtcttgcttaacagttacatcatcatgtttatcttttgatgtatttgcttggttagcacctgttgcaaaatatggtttaggttgctgagattgttcagcttcactcttatcagaaactgttgaatgctcagtgttattttctgcttctttaatagtctcgtgtttatcattgtcttcgattggttctggatgtgatttatccattgcaaaagcattcttattataatattcctcttcatgttgaggtgtactgtcttgatggctaggttcttgactttcagtactgtgtgatgattcgacttgacgatcatctattgtgccagcctcattttgaacattgtcttcagatgtttgtgattcattgtgaacttgtttattatgattcgttgctaaatcacggcgtctttttcttctttgggcatttcttggcggaaactgttgctccgtattctctattgtatcctgatgttctaattctgattggtctttttcaacatcttccgtatggtcttgatgtgaatttgtgtctatcgattgacgatttttttcaaagtcatctttaaaattattagacatagccatcttcctttctattctattacaatgattttacataaaatatacccacatgacatatgtttatgtatatttttcaaaattatttcaatcatttttcaattgtgtatacactaattatagcttgtcaattttcttttagtaaagtaatactatctgagaaataaattttgcaacttttcatcaaatccaatacttctaattaccttcttcttatttaaaattgcgatatcagttatattagaatcattgtcacaacatcgatcttgtgccggtggatattcaccgaaaaattctaataaatacttccgtctacattgatccaatttgcaatagccaatcatgcgaaagaatcctaattgctttcgtttaaatgattgcttaaatatctgtttcaaggcgccgatactatagaatgaatgcaacgttgtcaaaacgtcttgtttatcgggagctaaaaattctcctatttcgaaattttgtacatcttcttctgttatcatatctgcaaataataacgtttctaaaatatatttatcgtccggttggaataaactaattgcctgacttagttcaccatcgcgacccgcacggccaatttcttgaatgtagttagaaggacttgttgaaagatgaaagtgaatgattgtgcgaatatcttttttattaattcccataccaaaagcactcgttgcgactataatcggaatatcattatttaaaaattgttgttgaactgtgtgtcgctcttgataattcatatcaccatgataaatacctgtaagaaaacctgaatcataaataagttgcgctaaattcagacacatctttttcgatgagacataaataatcgttggtcccgactgttgtagaaacggcagcaaccactcaattttatcttcgtcatcatgaaaattaagatgcttaaagcttatgtttgggcgattcattgtagttttaataacgttaaattgaatcgctaacatttccgtcaaatcatcttgtaaatgcggtggtgcagttgctgtcaatgctaagacaaccgcttctttaaaatgctttgttacttttcctattagagcataatgtggtctgaaatcatatccccattcagataggcaatgtgcttcatctagaacaatcatgccaaagtctatcatagatattaatttaaaatttgacggttgcaagagaaattctggacttagaaagatgaagcggctatgtcgtaaacatttaatattatgctttttctcaatttcatccataccagagtgaatacatgttacacgtttttctccatttattttcaactgcataacttggtcatccattaaagatattaacggtgagataattaatgtcggcttacctgataaatacgtaggtatttgataacacaaactctttccacttccagttggaagtatacctagagtgtgttgttgagacattatactttctataatttcctgttgtcccggtttaaaactctcgaatccaaatttgtttcgtaaaatatcatgcaacattcagatcacctctttcaaatccaacgattaatacttttaattgaaaatatgataacgtgtcaaattgttctttgtaaaattttaatcgttcgccacgatgctgttgataaaaattcaaaaactggagttgatcttctagttcaacataatcatcgtaattagacatgtaacctttgattaagatttcaagtacatgatcttcgatagtattgattttaacttgttgttgagccgctatatcttccatcgtgaattgttcaagcaattttgtataagtaatataagtttgatttaataatgtaggtttcattattatttttgataaaatagtatattctccactttctaattcaaacatcattgtcactaaattattcatttcgtattcaaacaattgctgttgagatagcttttctattaaactaacttgctgtctcgtatacattggttcatcatagccttgcaaataataatgtaagtaacatggcccttttaaagttattgctttaaacaagttatgtagttcattttcaaaatcaatttgtaattggttttctttaatgtagttatagacaatctttacagtttcttgtatcttattattttgagagattggtacaaaatgaaaaacatgttgtttggtattagacatggtttgcactaatagttgaattgcttgaaatgtttgccccatgctttcaaatgtatatctaggatgcaacatgatttccatttcagcattaaattcattgattttttctaaaaatagctcaaaagacggatattttaatagtggtaaactgtgatataatgacaactgttgttgactacaagcgtcaaaaaaggtttggtgagatttcttaccaactaagatattgtaaatacttttatttgttttatagttaaatgtttgttgtaatgctgtttttataatgtgttgcaaatttaaccctcactctgtaaaacggataatttgaaaataaaaatgatgctgtctaaaattttagtcacattactattttagcatttttatcaaaggaggcgaagacattggcaaaatatacaatcgttgatatggatacttgtattgcatgtggtgcatgcggtgcagcagcgccagatatatatgattacgacgacgaaggtattgctttcgtaatccttgacgataaccaaggtactgcagaagtacctgaggaattatatgaagatatggaagatgcaattgatggatgccctacagattctattaaaattgcagacgaatcatttgatggggacgctttaaaatttgaataattgattttttagacaaatgttctatagaaaaagcaggcaagctatcgtttattgatagtcacctgctttttattattatgtgtatattattttgctttaatttgattaaattcttttcaagaaattcgcaagccttctatatagtaaaataaatacaatagaaataacgatacctttaataatattgaatggtataattcctgaaacaatgattactttaagattatttgcgatatcagctaagttaaatatcataccgtacaaaggtaatagaacgaaatagttcaaaatactcaacacgatagtcataacgattgttgcaatgattaatccagtaatcaaagattttgttgaacgtttatttttatagatggcgtaagcagttaataagaaacttgcgcctgctaaaaagttagcaaatggtccaactggatcgcccatactaaataagtagttcaataaatttttaaccagtgcaactacgataccggcaactggtccaaacgtaaatgtagctagtagtgacggtacatcactaaaatctaaagttaagtatggtggcaaaaatggtataggaaacttgataaaagttaacacaaacgcaatcgcgctcaacatacttattgtgataagacgtttattttgttgcatattcaattttctccttccattcatctcgtaagaataggaggattattgcacaacaaaaaacctccatcttctcccatccagactatactgtcggctctagaatctcactagatcagccactaatatgatacatactagcaggtcgcaggcttaatttactgccggttgggaattacacccgaccccgaagatgaattttacattattaaatttaattcccattaattttatactatatatcacaaaacctcaataactatgcttaaaatgaaaattaattaagttggtgatgtataatgaatttgcgatttgcgagcattggttggaatgttgtttgtttgattaatttttgagatggcttttttgaacctatctttttattgtttttagtttaatcattcgtgttagcttattcatgattaaatacacctacttctattacatccttcttactataattaggtcttgttgtatttatatatttattagaaatttgaagagaaacattcaaatcatgaggaatattctttttcttttttagcacttcagaaaaatcaatcatctcgtctattgtattatctttagtaaaattatctttagtactaaataaagttgtaacaacatatggacgtgatttatctttaagttgtttttttgagtttctgataccgtccctaaaagacttatcatcctctttgattaagggttgaaaatactttttatattcatctaaagtatatggaattgcagtcaaataataatactcatttctaaaaccactattctgcgttttcataattgcattttcagtataaccagtatatttatatttacttttatattcttttaaaacttctgttaaattatccaactcttccttatgtgctcgatattcaaagccactcaacactgtaccaactaaagtactcatatcatcgcctttatcctcacttcttaatgagctatcactgtcaataattgatttgtcaaatggaatactcgcattaaatacgatatcgtggtcatcacaatgcacgtatacttctacgccgtcgccactacctacaacattcgtagctttaacttttagaccgaagttatccataaaaaattgttcgccacgtttagcaattttatctttatgcttcttcgcaaattcaatcgcatctttttctgcaggtggttggaagccttgacctacatattttgaagcttccatttcttctggtactgattttgtttctttattagattcgttattggtagttgaacatcctgatagtattatcgttgctattaagattagtttaattcttttaaacatagctcatctcccatttatgtgtttgtttagaatattaaaagcaattttttaaaattttattcacctttactgtgcaccccatattctattggacgattatcatcataaaaggcttttttagtattaatagtaggcttacctatttgaattgtaattgtagatttatctggtttattttttaaattatataatttatcacttagttcaattacatcatcttctgtattgtcattagtaaaatttttctttgtactaaacagtgtcgctactgcatctgtatcagcggcataattcacttcttttcttgctcgttccattccttctttgaattccttatcatttttttgaatcaaaggttcataatactttcgatattcttttaaacttctagaagagtatgtaatataaaaatattcatttttatatccaacgttttgtgtcttattaattgcttctttagtaaaacctgtatattgatatttcttttcattttctttgaaaaatttatataagttatcatacttttctttttgcgctcgatattcaaagccactcagcactgtacccaccatcatactcatatcatcaccgttgtcattactacgcattgatcctttttgatggatggcatctttgtacaagggcaaacttgcattaaatacaatgccatgatcatcgcaatgcacataaacttctataccatcatctttacctacaacattggtagcctttaccttcagtccaaagttgtctttaaagaattgttcacctactttttcaaattctttacgatgcttcttcgcaaattcaatcgcatctttttctgcaggtggttggaagccttgtccaacatattttgaagcttccatttcttctggtactgattttgtttcattgttggattcgttattggtagttgaacatcctgatagcagtaatgttgctattaagattagtttagttcttttaaacatagctcatcacccatttatgtgtttgtttagaatatagagaaattagctgatttcaagtcattcgacctcaatccttatagactcattatcactgtaattaactcgattagtactaatagtagattttgctagttgtaaaaatattttcgtattttcaaaattaaggtgtaactttttcgtactttcagacaaatctataacatcatctaattttttgtcctttgaaaagttactacttctcgaaaacaatgttgtatgtacttctattgcagctttatagcctactcctttccttgcttgtttcataccttttttaaaattcagattatttttctttattaggggttcgtaatatttcctatattcttggagcgtcggtatattagcaactatataaaaatattcattttcatatccactattttgtgttttgttaattgcctctttagtaaatcctgtatattgatatttcttttcattttctttgaaaaatttatataaattatcatacttttctttttgcgctcgatattcaaagccactcaacactgtaccaactaaagtactcatatcatcgcctttatcctcacttcttaatgagctatcactgtcaataattgatttgtcaaatggaatacttgcattaaatacgatgtcgtggtcatcacaatgcacgaatacttctacaccgtcgccactacctacaacatttgtagctttaacttttagtccaaagttatccataaaaaattgttcgccacgtttagcaattttatctttatgctttttcgcaaattcaaccgcatctttttctgcaggtggttggaagccttgacctacatattttgaagcttccatttcttctggtacagattttgtttcattgttggattcgttattggtagttgaacatcctgatagtagaatcgttgctattaagattagtttagttcttttaaacatagctcatcacccatttatgtgtttgtaaaacttttatgtttgaaaaaactacttattctcaatgaaaacaagtagcatttaataaattaattagtatacagctagtttttctaattgttctttaacttgaattaagtttgaccgtattagagaggcagattgatccatcgtttgaattgcttgtccttcattttcgttcaagccattacaaacaacttcaaactgttgtgccatttgatcaagacgcgcatgagcttgtgtgtttaaaataaacatatcgtcataatgtgatggttcaaatatcatttgtacaatcaaaggcttcatgttcttaacaatatcatctaaatggttatctaaaattggtgacactgcttttaaatcattaagaaaaggctcccatttgcctaaagtattatctaattcttctaatttagttttaatataattacaagttacattaggaatcagggacaaaaattctttcttttttacatttaacatttcaattgcatgtcttaaattcttacgtattttgggaattgtattaatcaaatattttattacatcgacaattttcgatgcatattcatcatatataccttgaacatagtctgctatttttttaataccatcatcgatatggtcttttaatattttcatttttcttcctaaataattagaaggtaaagctagaccctgcaccatattttcaccgctataattaatttgataatttccatctaaaattgttgcatcttgttgcttcataatacttctaatatctgcaatttgcctaccataaatatcattttgattttttatttgctctatattctgtttcactactttcaaatgtttcatcatttcttcagatactccatctctgaagtcgtgatctatatttttgaaaatttctaaaatttcattatctatactatcatacactttttctataaaagattttatacctttaaacaactcattaattctttcttttaatgcatccaatgcaaaatcaggtaataagtgtttaacagcactaatactttctattgtttcatctgcaacttcttcaagtgcgtttattttactaattaaagttctttccatttcttctaattgaaataagttaatcttatccttaaatccttctgataattgtttctttctatctgcaaaatttttattttcattttctgagatgttaaaactttcatttaaaaagattacgcattctgctaacataccacttgtttcaccagtaatcagtttactcaacgcatcaagattttctaaattaagtttaattaaagttccttttccggaacgtgcaatcgaatctcctgtccaaacatttattggaattcgcccatccatatctaatgttatgttaatagtcttttttactttttttccatttttaatttctgtatcttttaccgacttaattttgattagtggtacagtatcgtatgtgttatcttttctatttaacttccttttataacctacatggctgtctattaaagcatctaacctgggcacaccatcactaatgttaacgcgttttcctggcatatctttgatgaatggatcttgtaaccatgttaataaatcgttggtactattaaaactaatcatattatcaaagcgtggtctagcaaatttctgccaagcagcataaggaatcattgctgagtcagtagcaacaactttttcattcggatgtttcgctccttgatattttgctcctgcaccaccttccgaattaccaccatccgccacaattgttttgtttttgtaattataaggtttagttttgtattttcttctaaattcattttcatcaagaacagaagcatctttaattttttgtcgataactatttgcgaattcttctacttgctttaaataatctgtgctttcattatcattattcattaatttagcattttggagccaatcatctccaaaacccgatgattttaatggattatttgggttaattgcctcattagatgttccttgataaattattgtctgttgaccagttggattcccctgatcattaagtaactcgtatgttttaatatcagcagcaccattcatattatcattactattatcattataattatctatttgtttgaaccgttttccatttactttaaaatcttttttttcatttatatcttgataaacccaataactgctcaattctgctatgtccctatcatttattttattcactttatattcacttacccttcaattggatttatatcgtcataaaatggttttttagtatttatactagattttcctaattgaatagtaacttgagatttttgaggcatattgggtttttcttttaatttattactcaattcaatcacatcatctactgtattgtctttagtaaagtttttcttagttgaaaaaagtgtagaaactgcatcagtattggcagtataatctaactcttttctagcttgttgcataccttctttaaattctttatcatttttatgaatcaacggttcgtaatatttacgatattcttttaagtttcttgataaatatgtgatataaaagtattcattttgatatccaacgttttgtgtcttgttaattgcctcttttgtaaagcctgtatattgatatttcttttcattttctttgaagaatttatataagttatcatacttttctttttgcgctcgatattcaaagccactcagcactgtacccaccatcatactcatatcatcaccattgtcattactgcgcattgatcctttttgatggatggcatctttgtacaaaggtagacttgcattaaatacaatgccatgatcttcacaatgcacataaacttctacaccatcatctttacctacaacatttgtagctttaacttttagtccaaagttatctttaaagaattgttcacctactttttcaaattctttacgatgcttcttcgcaaattcaatcgcatctttttctgcaggcggttggaagccttggcctacatattttgaagcttccatttcttctggtacagattttgtttctgtgtttgtgtctttatttgattcattttccatcgcggaacatccccctaaaattaatgtcgtggttaaaactgatccaatgaactttttcatatgacacctcgaataatttaattaatacaatatatctatattttaccctatttttataatcaaataaataactttatcaaactttatatttttgtataaattagtaatatatttaatagttgatattcgcaaaaaccctaagttctaatccacatacaaaattccccacatcaatcaaaaaacgcatgctataaattagagtctctaatcaataacatgcgttctgaaataactatattcaattttattctggttttggtagtttaataataaatgttgtgcctttccctaattcgcttttaacatctatggaaccaccatgctcttcgataatcattttacaaatgaacaaacctaaaccggtaccttgtttacctcgcgttctcgctgcatcaactttataaaaacgatcaaatacttgttgtaaatgttctggtgcaatgcctgtacctgtatctttaatgtataaaatatcttcgctttcattttcatcacaagtaattgcaatttcatctccaggtttcgtataacgtgatgcattatcaattaagttcgttagtacttggtccatgcgatccatatcataactccaaacacgcttcttacaataattaaaagtcatatttagacctaaatcatcagcttgttggcgatacttaattttcatcttatctagtaacgctgcaataggctgaacttctttatttacggataacccttcagcatccatgcgtgcgacatttaacaattcattaactaaacgatttaaacgtttcgattcatcaaggacaatggcaagcgattcttttatttcatccggttctgtaacaataccatctacaattgattcagtataaccttgaagtaatgatatcggtgtacgtaattcatgtgatacattagcaatgaaatctttcttcatttgatctagattgtgctcattagtcatatcacgaactgtcacaacaacaccacttttacctccctgttcaatcttgtcgatatagcttgtggtcacaacaaagaatcgtgcattcatttctaaatcacgcatttccgtttgttttgatttaaaagtatcttcaatttgtcttaataagaaagctttagcatcttcatcaatattgtccataatatcattcgccatcttattagataagataatttgtcgactctcattaatacctaggacaccttctaccatagagttaattaagctgtctctaatatttttagatgtggataatgcgtcgacatgctcttcgatttctgtactcatctgattaaatgcctgcgataattgaccaatttcatctttcgttgtgacagaaggtttataagagtaatccccttcagatacacgtgtagcttggtctcttaaacgtcttaaaggttttgtaattcttgatgataagaaaaacgcaaagactgttgtaattgttaagaaaataacagccgtaattatagtgataatcgtaatagcattatttgtatcttcgattgatttcaagtctttatatataaagactccactatatttgctatgactattcttctgtgcttttgttggatagcctaacaaaatatatgtttgagatgagcccttttctttaatcgttacatttcgagtaacagatttacctttatcaaacacatcgtcaaaatggtcgttgttgactacttcattcaacatttgctttttaatattagaaagtgaagccgttgattgacgatgtttattatttataatcatcaacccaccaggattttcaattaatgtttgactatattttattgcttcttctttattatgtgattgttcgaccagtgaacttatacgtctagcatcttctcttatggcattttcggtttcttgtgtgaaatagtattgcataaaggtaattaaagcaatacttaataaaattaaaactgtcgtcactattaaaataatagttaaccacagtttaattacgacactatttagccggctcatcattagatttaacctcaaatttatacccaacgccccagactgtttgaatcatatgcgcagcttcactagacacacgatttaacttttctctaagtcgtttaacatgagtatcaactgttcttaaatcaccatagaattcataatgccaaacttcttttaataattgttcacggtcaaatactttatttggtgttttagctaaatatattaataattcgtactctttaggagtcaaattaacttcttgattatcagcaagtacgcgatgtgcatcattatctatttctaaatgtttaaattcaatcacatcacgtgcgtgaggttcgctttgttctacagttgtagattgcgttcttcttagaagtgctttaactcttaagactacttctcttggtgaaaatggtttgacgatataatcatctgcaccagattcaaaaccttcaacacggtttgtttcttcacctttagcagtcaacataataatcggtgtttgtttatgttcacgcaatttagttgccacctggataccatccatttcaggcaacattaaatctagtagtatgcaagcataattattctccattgcaagttcataagcctcttggccattacttgcttcatggatttcaaaagattctctttctaaatacattttaagtaatcttctgattctatcctcatcatctacgataagtatttcgttcgacatacaggtcatacctcccacacatgcttttctttacaaaagtattatatcacaggaaagcgcatacagttattaaaaacctaaaattttgtgaaaaaattctcaaactttgtgataaatacatattttatttaattatttcccatgttctgctaaatgacgcatcacttttacttcatgaggcgtcaatacacgtccttcaccagcattcaaaccgacaacatttaaaggcccatattcaatacgagacagtttcgtcacttgatgaccaaaatgttcgaacattcttctgacttggcgattacgaccttctgtaattgtaatttcaaccaatgttgtgtttttatctttatcttgtttcttaactttcacttcagccggttgcgtcataccatcttctaattcaatacctttttctagggctttcacttcttctctcattaagtaaccttttaattttgctacatatttcttcttaatttgatatcttggatgtgtcattaaattagtaaattcaccatcatttgtaagtaataacaatccagaagtatcatagtctaaacgaccaacaggataaatacgtgcttctatatctttaaagtaatccgtaaccactgtacgtcctctatcatctgatacacttgttatcacttgagttggtttatggaataaaatgtaaattttgtcttctagttctattttaataccttcaacttcaatcgtatctgatggctttacttttgttcctaattcagtgacagtcgtaccattcactttcacttttccttcagaaattaaagtttctgccttacgtcttgaagtataaccgctattagctatacgtttttgtaatcgttctaattctttagtcattattttctcctttttgattgactagattactgaagaaagcatccatttcttcatcgtcttcttcagttgtcggcaaatcttctatattggaaataccaaatacatttaaaaataaatcagtagtaattaactgttggctacgctgttcattgaccactttagcctcaactagtcctttggcaatcaatgtcttgaccgcaccatctgaattgatactacgaattaattcaatatcacttcttgataatggctggttataagcaataattgatagaacttccattgctgcttgtgataatttcatttgtgacttttgttcaattaattgttcaatatacgttgccgcttcttttttagtcgttaaaacatacgtcgttccaaatcgttgtatcattaatccatgtgatgaataattttcaattaattcaacgagttgatttttcgacatatctaatatttctaatagttgtttttcatctaaaccttcatcgccagctgtaaataatagcgactctaatataccatgattatccaaaatggtagttcactcctctaataatgttaatatcttcaaaattacgttgttgctcaatattaattattcctgcttttgacatctctaaaatagctaaaaagtgagtgactacttgttcaattggctcagaaaacgtaaacagactaaagaagttaaaatgatctttatctttcaatctcgatgtcacttgttctgtagcttgttgaatggtaaatgtctcttttcggatttcaacagatttaggtgtatttaactcaactctatttttaactctttgataagctacaattaattcagttaaatcaatcgtatgatttggatcccaagattcatccgtttccaaatgagataaatctgtcggtcttttagtaaaataaaaatctctttcttctttcatgtcatttaaaatagcagtatattctttataattttgatattctattaaacgcccaactaaatcttcccgtgggtcatcatcaacatccatatctgatgttgattgtggtaatagcatcttacttttaatcattaagagttctgacgctaatactaggtattcacttgcaatattaatttcaagctgtttcattgcatgaacgtactgcatatactgctctgttaatgcttgcataggaatatcataaatatctatttcaaatttttggataagatgcagtaataaatctaatggtccattgaaagcatctaatttaacttcatacataatatctacctcgtattgcgtcatatgtgcataattctctaaaatattatagcatgaaaataacttacttttaaattggggtgataacaaaatgcaacaggcactgataaatttctattatcaatttcatactaagcaacattatttcctatgtcatgacattttagaagatgcatggaaagctgaaaataactacagtaagcaagatgcagttgttagtttaatcttgtttgcaactgcttgttaccattatcgccgcaataatttaaaaggcgcctataagtcttttaataaatctaaagaaataatacaaaatgctaaagatagagatgcgttataccttaatttaaatgattatcaattgttaattgagcaacagattgcaaaattgaatgcagcaaagcctttttcatctgttatattaccaataactccagactttgaacgcatcatcaaggccaactatccagactatgattataatcaggaaacatcaacagatccttttattgtagaccatcacatgcggcgtgatcgttcagaagtgatttcagcaaaagaagaagcgattcaattaagaaaacatagacgtaattaatcaaccaatttaaaaaagccacaatagcacagacatttttagtcatgtgtattgtgacttttgagttatggttcactttatgctctaggatgaaattggttatacatttttctaatttgagattttgaaacatgtgtatagagttgcgtagtagatatgtcagagtgacctaacatctcttgcactgctcttaaatctgcgccattttccaataaatgtgtcgcaaaagagtggcgtaacgtatgtggcgttaacgtctttttaatgtttgcctttacaccattttgtttaatcattttccatattgcttgtcgtgataaaggtttaccatgcatatttaaaaataagacttcggtaacagtcttttttaaaagttgcggtctaatcgtttcaatataagtagttaagtactcaatgactgcgtcgcctaatggtacaattctttctttatcgcctttaccaaatacgcgtacaaatcccattattaagttcacgttttctaactctaaatgtatcaattcagatacacgcattcccgttgcgtacagaagttctaacatcgtacgatcacgataaccattaattttatttagatccggcgtttctaataaagccaacacttcgtcaacatttaaaacgtcaggcaattttttgtcatattttggtgaatctaataataccgttggatctttcgccgcatatttttctcttatagcaaattgatgaaaactacggattgttgaaataaatcgcgcaatagatttagcagattgcccttggtctattaaatgccccaaacactcttgaattaattgtcgatctataaaatcaatatgcgagatatgatgttcagtcatataatcttgatactttttcaaatcacgtctataagcaccaattgtgttagaacttagtcctttttcaatttgtataaaacgcaaatattcttcaataattgtttccataaccacacctctaaaaaaagcgaaggttaatttaacctacgcaatttactatcctttacctttagcttggcacgtttcacacacaccatggaaagttaaacgatgatctaaaattttaaaattgaactcattttcaactcgattttcaacttctggtaacaaatcttcatcgatttcatctacacgaccacattccatacatactaaatgatggtggaaatgttttgcgccttcttttcttaaatcaaaacgagcgacgccatcaccaaagttaattttgtcgacaacttttagttcagctaacaactctaacgttctgtatactgtcgccaagccaatttcaggcgctttatcttttactttcagatatacgtcttcagcacttagatgatctttttcattttcaattagaactctaacagtagcttcgcgttgtggcgttagcttatatgatgattgttgtaattgttgcttaacgcgatttaatcgttcttccaacgatgtccactcccctactaataattaaaatcattacaaattatttcaaacttcacaattaaaactaacagttttctcaataaaatgcaagcttttctcatttgttatttagaatgattataatttaataataggtgttgcaatgcaatgatagtcttcgcatcttctatttctttattcattagcatcgatttaacattctcaatcggaactttaatgacttcgacaaattcatcttcatctaagtgaactgtaccttcttctaaattatccgtaaaatatattgataattgttcatcgcaaaaacctggtgaaccatacatatctacaacatgtgttaactctttggcaatatatcctgtttcttcttctaattcacgctttgccgcttcgactctatcttcatcatcttctaatttaccagctggaatttctagcaatggtttttctactggtttacgatactgtttcactaatacgacttcttttttaggtgtcactgcacaaacagcaactgcaccattatgataaactaattctcttgttgatgtttcaccgtttggtaatgtcactgtatgaatttctacatctacaattttgccattataaataactgttcgatcaattgttttttcatttaaatccattataatcacgttcctttaaattcatattatatattgatacactatgcttgttagctaaagtgtatcgaaaggagaacagacatgcaaaaaaatatattaaaaagtggtatttcattatctgaattaggtctaggttgcatgagtttaggtacagatttaaaaaaagccgaacaaattatagattgtgctgttgaaaatggtatcacttattttgatacagcagatatgtacgataaaggtataaatgaatcagttgttggtaaggcacttcttaaatatcaacaacgcgatgatattgtcattggtacaaaagtaggcaatcgtttaacaaaagatggcagtacaaaatgggatccgagtaaatcctatattaaagaggcagttaaaggttcactaaagcgtttaggtatcgatcatatcgatttatatcaacttcatggcggaaccattgatgacccattagacgaaacaataagcgcatttgatgaattgaaacaagaaggaattatacgtgcttacggtatttcttctattcgcccaaatgtaattgattattatttaaaacatagtcaaatcgaaacgataatgtctcaattcaatttgattgataatcgtccagaatcattattagatgcaattcacaacaatgatgttaaagtattggcaagaggacctgtgtctaaaggattattaacttcaaacagtgttaatgtgctcgacaataaatttaaagatggtatttttgattattctcatgatgaattgggtgaaacaatagcctctattaaagaaattgaaagtaatttatctgcattgacatttagttatttaacatcacatgacgtgcttggttccatcattgtaggtgcaagtagcgtcgaccaattaaaagaaaatattgaaaactatcatactaaagttagtttagatcagattaaaacagcaagagctcgtgtaaaggatttggaatataccaatcatttagtgtagaagtcattttcagtaataaaaacagcagcatgaggcgtttcattataaaaatgccttactgctgttgtttatgtacaattcgctataatttatgattatgattactcacttatgatagaaattaaagcgttgtcctcacgcatcagtatttagtaatttcgccttgcggcattgccttaagcaaacttctgccacttcatctcttaataattttattaaaacatctttctatatttcacttcgcatgttgattcatcattattagttattatttgtacacccagcacatttccttgcaacacaagtagtttgaatttttcacaagtataatataatgtactgtctgaaatttggtctacagaaatatcgcctaaaatatccagcactgtaaattcttcaaacactgatagttgttccgcatatcgtacacaaaatcttaccacactctccgattgacagttcattgccatcccacctatttatgctttatttttaaataatttagggaaacatcgttcaaaaaatctaggcgcaatttgatacattttcaacgcatgatgcatccatttaggccgattaatttccaattgttttgttttaatgccataaatgatatcttctgcaagctgattagcatcaagcataattttccccatccttttagcatacttcattgatgggtcggctttttgatgaaaaggtgtatcaatcgggccaacattaactgtcatgatatgtaagtttggtgactctagtcttaaagcattcattaatgcataaaaccctgctttcgatgccccataatgtgcagcatttgcttgtgtggaaaatgcagcttgacttgaaatacctacaatatgtgcgttagatgttaaatatggtctcaacacagtatataaaacattaaaactaattaaattaagctgatacgtttcaatcatttctgaaaaactatggtctgaaatagatttgaaataacctaaacctgcactataaatgaatccatcgaatgatgtattgtcttcaaattgcagtgcctgtatcgacttcaaatcatttaagtcacaaggaataacatttatagttttccccaattcctgttcaaagattctagttgctttatcaacatcacgcaccaacaacgttacatgcactttattttctagtaactttcggacaatcgataaacctaaaccactcgtaccaccagtcactataaaatgttgtcctttcatcaattaaccttccttttcaattatatagaatgcaatttatcaactttacataattgagacaagttgattatctttcctaatatatatacaataataagaaaatataacatacaaatcaaaaactaaagggatgtgacgttaatgaaactcgtattttatggagctggtaatatggcacaagctatatttacaggaattattaactcaagcaacttagatgccaatgatatatatttaacaaataaatctaatgaacaagctttaaaagcattcgctgaaaaactaggtgttaactatagttatgatgatgcgacattattaaaagatgcagattatgtttttttaggtaccaaaccacatgactttgatgctctagcaacacgcatcaaaccacatatcacaaaagacaattgcttcatttcaattatggcaggtattccgattgattatattaaacaacaattagaatgccaaaatccagttgctagaattatgccaaacacaaatgcgcaagtcggacactctgttactggcattagtttttcaaacaactttgaccctaaatctaaagatgaaattaacgatttagttaaagcatttggttctgtaattgaagtatcagaagatcatttacatcaagtaacagctatcaccggaagcggcccagcatttttatatcatgtattcgagcaatacgttaaagctggtacgaaacttggtctagaaaaagaacaagttgaagaatctatacgcaaccttattataggtacaagtaagatgattgaacgttcagatttgagcatggctcaattaagaaaaaatattacctctaaaggtggtacgacacaagctggccttgatacattgtcacaatatgatttagtatctattttcgaagattgtctaaatgctgccgtcgaccgtagtattgaactttctaatgtagaagaccaataaaaacaaacccgccaacacatgtatgcatcatcgcatacatagttggacgggttatttttataaattattactatttggcaagcattgtttattactttgtcattagactttaaaactatcaaaatcttttacaaaattaaaattaggtgtatcttcattttgtatcaatgtttgataaatttcatttatatcttctgtattatagcgattgctcaaatgtgtaatcaacgtacgtttaacattggcttcttttatcaatgcaaatacgtcttcaatatggctatgatgataattgttggctaaatgcttttcaccatctatataggtcgcttcatgtaccatcacatcagcatctctagaaatcacacgttcattagaacatggttttgtatcaccaaaaattgctacaactggaccctgtttggactcacctctaaaatcttttgattgataaacttgaccattatgttcaaatgtatcatgagattttacttcttgatatttaggacctggttcaagaccaatgttttttaacgcttcaacattgattgtacctgtagtttcaggtgccattactctatatccatatgatggaacaccatgattaagtaaatgcgcctctacagtaaaaccatcatgatgatatgtcagatgatcatcgatttcaatatatgtaattggatagtttaaatgtgactctgataaattcatagacatttccacatatgctttaattccttttggtccaaccaatgtaagcggcttctgttcaccgccctgaaaagaacgactagaaagtaatcctggcaaaccaaaaatatgatcgccatgcatatgagtaataaatatatgtgtcacttttcctaatttaattgcatgatgtaaaatttggtgctgtgtaccttcaccaacgtcgaaaagccatatggaattggaatatggttctaaatttaaggcgattgcttgtgtatttctctcttttgtaggcaaacctgcactcgttccaaaaaatgtaacttccatatatgcccctccttttcttcaattcattttatcataaaatttgtatcaatttagttttaatttatacttgaatcaaaatctgttaaaaattcgtctttgctagttaatttttctaactttaacgtagacaaaactatataaattttgataattacgttatacttatcattaataagtatcacattaaacatgatacatgaatcgatatttcatttaagacactgcatactgtcgagcatattgaatgacctgctgaatggattatcttataataataaatcatatatctaattaagaattgaggttttaatcttgagtactaaaaacaaacacatcccttgtttaatcacaatctttggtgcaactggtgacttaagccatcgtaagttgtttccatcaatattccatctctaccaacaagacaatttagatgaacatattgccatcatcggtattggacgtcgtgacattactaatgatgatttccgtaatcaagtaaaatcatcaattcaaaagcacgtaaaagatacaaacaaaattgacgcgtttatggaacatgtcttctatcatagacatgatgttagtaatgaagaaagctatcaagaattactagattttagtaatgaattagatagccaatttgaattaaaaggtaatcgactattctatttagcaatggcaccacaattctttggcgttatttctgattatctaaaatcttctggtcttactgatacaaaaggatttaaacgccttgttatcgaaaaaccattcggtagtgatttaaaatcagccgaagcattaaacaatcaaattcgtaaatcatttaaagaagaagaaatttatcgtattgaccactatttaggaaaagacatggttcaaaatatcgaggtattacgttttgcgaatgcgatgtttgaaccattatggaataacaaatatatttcaaacatccaagttacatcatctgaaatactaggtgttgaagatcgtggtggttattatgaatcaagtggcgcgctaaaagatatggtgcaaaaccacatgttacaaatggttgcattattagctatggaagcacctattagtttaaatagtgaagatatccgtgctgagaaagtaaaagtacttaaatcactgcgtcatttccaatctgaagatgttaaaaagaactttgttcgtggtcaatatggcgaaggctatatcgatggtaaacaagttaaagcataccgtgatgaagatcgcgttgcagatgactctaacacacctacctttgtttcaggtaaattaacaattgataactttagatgggctggtgtaccattctatattcgtactggtaaacgtatgaaatctaaaacaattcaagttgtcgttgaatttaaagaagtaccaatgaacttatactatgaaactgataaactattagattcaaacctattagtaatcaatatccaacctaatgaaggtgtatctttacatctaaatgctaagaaaaatacacaaggtatcgaaactgaacctgttcaattgtcttattcaatgagcgctcaagataaaatgaatactgtagatgcatatgaaaatctattattcgattgtcttaaaggtgatgccactaacttcacgcactgggaagaattaaaatcaacatggaaatttgttgatgcaattcaagatgaatggaatatggttgatccagaattccctaactatgaatcaggtactaatggtccattagaaagtgatttactacttgctcgtgatggtaaccattggtgggacgatattcaataattgaattaaaacgcacatgttaaacaaaaataaatgagcgaatgacaaggattgattacgaatcaagtaaatcaattgttctatcattcgctttttttctagactatattatgaaattatattttacaatgcccaaaactattttaataatcattgaacaaatgggtgtataatttatagaaataatgtagaataaaaataaatgattgaattaattggagtgaaagttttggacgttatcaagcaaatacaacaggcaattgtttatattgaagatcgtttattagagcctttcaatttgcaagaattaagtgattacgttggtctttcgccataccatcttgatcaatcatttaaaatgattgtcggcttatctccagaagcttatgcacgcgcgcgtaaaatgacactcgctgcaaatgatgtgattaatggtgctacacgacttgtagatatcgctaaaaaatatcactatgcaaattcaaatgattttgcaaatgattttagtgattttcacggcgtatcacctattcaagcttctactaaaaaagatgaattacaaattcaagagcgattatatatcaaattatcaactactgagagaacaccctatccatacagattagaagagacagatgatatttcattggttggatatgcacgatttatagacactaagtatttgtcacatccttttaatgttccggattttttagaagacttgctcattgatggtaaaattaaagagttacgacgatataatgacgttagtccatttgaactatttgttattagttgtcctcttgaaaatggtttagaaatatttgtaggtgtaccaagtgaacgttatcctgcacacttagaaagccgatttttacctggcaaacattgtgcgaaattcaatttacaaggtgaaattgattatgcaactaatgaagcttggtactatattgaatcaagtttgcagttaacattgccatatgaacgaaatgatttatatgttgaagtgtaccctctcgatatttcatttaatgacccattcactaaaattcagctttggattcctgttaaacagagtccttatgacgaagattaaaaattaaaaacaaagaagccccctaatatatctataggtctacaaatggccttagattctattagggggcatattaatatgttaatttagttcgataacacatgcttcatatggacgtaactgttttaaattaactttggcatcataattaaatagctttacttctccatggcttaaatcaaatggtacagttaattctgcttcgtggttagtaagattacctacaataagaacttgcttttcatttaatgttctcgtgtacgcaaaaacttgtgaattttcagcatctactaaatcaaattgaccatatacgtatacatcattagactttcttaattgaattaaatctttataaaattgtaatactgaatgctcatcttctaattgttgtgcaacattgatagttttataattcggattcactgggaaccacggttcaccatttgtaaatcctccatttaacgtatcatcccattgcattggtgtgcgagaattatctcggttctcatctttatatttcgcaagtaaagcgtctacatctccaccttgagctttcactatttgatagtcatttttaacagcaacatcgttaaacgtttcaatactttcaaatggataattcgtcataccaatttcttgaccttgataaatgaatggcgtaccttgttgcaagaaataaacagctgcatgacttgttgctgattcataccaatacttgtcatcgtcaccccacgtcgatacacgtcgtggttggtcgtgattttcaataaacaacgcattccaacctttattttcaagttgtttttgccatctatttaatacagatttatacgaatttacatcaaagtgagaatcaccactattccacagtcccaaatgttcaaattggaatatcatattaaatttaccattttcttccccgacccagtcatcagcatcatcagggcttacaccattcgcttcaccaacagtcataatgtcatacttacttaatgagcgatctttcatctcttgtaaccaagtttgtatacctggctgattcatatctacatcaaatgctggggcatatgttttaccctcaggtacaggtaagtcacccgcttcaaacgtcttcttaatatgcgtaattgcatctactctaaatccatcaatgcctttatcaaaccaccagttcatcatttcaaatacagcatctctaacttccggattaccccaattcaaatcaggttgttttttactgaataaatggaaataatattgctcagtattagcatcatattcccatgtagatccattaaatatactttcccagttgttaggttcagagccatctggctttggatcttgccaaatgtaccaatcacgtttgggattgtctttactagatttggattctataaaccaaggatgttcatcagatgtatgatttacaactaaatctaaaataagcttcatgcctctatcatgaacaccttttaataaacaatcaaagtcttccatcgttccaaattcatccataatttcttgatagtcactaatatcataaccattgtcatcattaggtgatttaaacattggactgagccaaatgacatcgatacctaaatcttttaagtagtccaatttatcaatcattccaggtaaatccccaataccatcgtgattactatcattaaaacttcttggatatacttgatatgctactgcttctttccaccattgcttattcattttaaaactcctttgctatcgctgtgttgattttcttatttttaattctgtatctataatgacgagttcaataacatcctgtgctttgtttttcaatatatttaaaattgctgaaccagcctgttgacctaacattcgaggcttgatgtcaatactggtttgaggtggtgacgcaatttcggttaaataagaatcattgaatgttgctgtcattacatcttttggaatttcaatattaagttcatatagcacacttaaaatcgctaaatgtaacatagcatctaacgaaatgattgcctgtttaatatttgggtccttcaagcgcgtatgtagattttgcatgtaattaaaaataacttttctttcattactagtctcaataatttgataatccagattaaattgtgatgcaaccgtttcaaatccttgaattctatcttttgaaacttcaaaatttcctttttctgtaataaatattaattcatctacaccttgttcaataacatgtcgtgtcaaattttcagaagctaatatattatcattatctatgtgtgtaaattgatgatctatatccgatgtaggcttaccaatcacaataaatggcatgctttcatcaattaacatttgtttaattggatcattttcttttgaataaagcagtataaacgcatcaaccattcgttgtttaatcattttataaacttcatccattaaatcattcatattatttgagactgtcgtttgtgtaccatagccatgctggttacacgtttcagaaattcctagcaatacattgatgtagaatggattcagtcgaataggctcctcagacccttttaacactaaaccaattttatatgtttggtttgtaattaaagttctagcagcggtattaggaaaataattcaattcttccataactttcttcacttttgaaattgtcgcttcgctaatacgttgatttccttttataactcttgaaactgtcgaaggagaaacaccggcttttagtgcaacatctttaatcgtaaccatttaatcacctcctgttaatttctgcatcggaaaacgcttccaaccactgtataataccagtttagtcacactttctaaaaaagtcaaaagatttgtgcaaacgattgcataaaacgataaaaataaaaccttcatactgaaattcaatccgaaaatcaatatataggtttgtataaatattaaaatcgattgtttagtcactaactgcaaaatagttaccttggccatcttgaaaattaaatacacgttgaccattcatttctactatatcatgcccagttaaacctaaatcatttaattttgagtataatgcatcaaagtttttctctttaaacattaaagatggtgttcctaggttcacttccgggctatacttttcaataaattcttttgccataatcgtcaatgacgtttcagcatctttcgtaggtgatacttcaactgcaacatagtcctcagctaacggtgtttcacttacaacaacaaattctaaagtttctgtccaaaatgctttcgctttgtcaacatcatcaacatataacataacttgatttaacttttccataagttaatacctctatttctctatagtacatgctatcataacacagtaaatattttattacttcacaaaatgcttaaaaatatggcgggatgcttttaaggtaatagatattgcttgtgtaattttttataggttgtagctactctatcacactctcttttatatttatcaaaagatataaaaaaggatagtatctttcaactatcctttaatcaatattattcttcaatccattgtgtatggaatacgccttctttatcttttctttcgtacgtatgagcaccgaagtagtcacgttgtgcttgaattaagtttgcaggtaaatcagctgcacggtaactatcatagtaattaatacttgatgagaaaccaggtgttggtacaccattttgaacaccagttgcgacaacatcacgtaacgcatcttgatattcagtaacgatgtttttaaagtaaggatctagcaataagttttgtaatcctggattattatcgtaagcatctttgatcttttgtaagaattgtgcacggataatgcaaccttctctccaaatcatagctaaatcaccaagttttaaattccattcattatcttcacttgctttacgcatttgcgcgaaaccttgtgcataagaacaaattttactcatatataatgctttacgaattttttctaaaaagtctttcttgtcaccatcaaatgatgcttttggaccatttaattctttagaagcatttacgcgctcttctttgattgaagagataaaacgtgcaaatacagattcagtaatgattgttaatggaatacctaattctaatgcgttaattgaagtccattttcctgtacctttttgacctgcagtatcaagaattttttcaactaatgcttctttattttcatctaatttcatgaaaatatcaccagtgatttcaattaaataactttctaattcaccagcattccagtctttgaacgtttgagcaatgtcttcatgagacatgcctaataattctttcatcatagcataactttctgcaattaattgcatgtcagcatattcaataccattatgtaccattttcacatagtgtccagcaccatttggtccaatataagtaacacatgaagcaccgtcttttgcctttgcagcaattgcatcaagaatatctgcaactttgttataagcttcttcttgtccacccggcattaatgacggaccagttaacgctccaatttcaccaccagaaacgcccataccaataaagttgattgcactttgtgctaatgctttattacgtctgatagtatcttgatagtttgtattaccaccatcaattaaaatatctccatcatctaataaaggtaacaaactatcaatcgttgcatccgtagctttacctgcttgaaccattaataaaattttacgtggtttttctaaagaattaacaaattcttccaatgagtacgttggatgaatatttttcccttttgattcttcaaccattaaatcagttttttcacttgagcggttaaatacagatacactatatccgcgtgattcaatattccaagctaggtttttacccataacggctaaaccaataactccaatttgttgtgtcatattacttacctcacttgttgatttttcattagtattgtatcacaaaatagacatacactacactaaatcatttcgattgtcgcgcaactattttgattatttctaacacttgacttgcaagcaagttcaatgatttaatcggcattctctcatttgttgtatggattttttcataacccactcctaaaatgactgaaggaataccaaatgtattaataatactgccgtctgaaccgccaccagaaataattgtatttgcagataatcctaaattacgagcactttcttgtgcaattttaactaccgcttcattatcattaattttaaatcctggataactttgctccactgtaacttctgctttcccacctaattctgatgcagtagtttcaaacacatcagtcatatgtttgacttgtgtttttattctttctggatcgtgagaacgtgcctctgcttctaaaatgacttcatctgcaacaatattcgtagctgaaccgccatgaaacttaccaatattggcagtagttatttcatcaacttgtcctaatttcattcgactaattgctttcgccgcaatattaatagcactaacaccctcttttggcgtacttgcatgagccgttttgccaaaaattttagctgaaattaacatttgcgtcggtgcacctacaaccgtagtgccgacatcagcacttgcatcaatagcataaccaaagtccgcgtccaacaactctgaatttaattctttagcaccaattaaacctgattcttccccaacagtaatcacaaattgaatttgtccatgtgggatttgttgttcctttatcacttgcaaaacttcaagcatcgctgctaatcctgctttatcatctgcacctagtatagtcgtaccatcagagtatatgtagccgtcatcttttacaattggctttacattaattgcgggtacaacagtatccatatggctcgtcaaatataatttaggtacttcgccttcttcgatagtactattcattgtacacactagattattggcacctaatttaggatgtttagccgcttcatcttctttaacatctaaccctaatgctatgaatttttcttttaaaataggttggattgttgattcattccctgtctcagaatcgatttgtacaagttcaaaaaacgtattaagtaatctttgctcattaatcataatggaaccccttttatcaaaattttcatgtacgccaaacggtaaaaattgatgaaataaaatgttacagtaattgatgttacacagatttatcaggcttgtaaattgtgtcatattattttcaatttattatatatatttattgtaactcaaactaagctttgtcaaaaatatattgattgatttttcaaagatatcgtataatgaggaaaatgacataagcaaacttactcatgttttttattatattccttaatgatgattgctagttatatcgtctcaagttaaaagttttatatcttatgtcgtaattattaatacaaaggttattcatttggaggcacacaaaatgcaaaataaagttttaagaattatcattatcgttatgcttgtatcagttgtattagcattgttattaacgagtatcattccaattttataaactatatctcaactacctatacaaaatcatacaattaaaaatccatccgttataaacgcatgtattaataagttatcgtattgcaacgattattttcaaacatgggtcatacggatggattattttttaagctacttcactatgcattttcaatgaaccaaattgcgatttgatttgtaaatattcttctaattcatttaatatttgaataatacttgctctcgagttaagcgctttgtgtgttgttggcaatggaagttcatccaatttcaaacgcgtctcatacaaattgtgtaaacgcattgctgtatagtcattactattcacatttagaccaatttctttcagcagtgacgcaacatcatttaaaagtggatctttatgacagatactttcgatgagcggtttcattctcattaacaattccacttgctcttctcgcatatcaaaataatgatagtatgaattttcgtttctaacaaaatgatttttaacatctcggaacgcgatagacttcgcctttttaatatttaaaagtaacacttcaaattcaatcgcaatggtatcttcatacttttcacaaatataactatatttactaaaaatatcagcaatttgttgctcaattttacatttgtattcgtctagttgtttgtctaaacttggcatcattaaattcattgtaaatgcaatgctcagtccaattaacagtaataatgtttcattaacaattaaatgtgcatcaattgattttgcattaaaaacatgaagtaatataacgcaactcgtaatgacaccttcttgtacttttaatacgacagttaatggtataaataacaatacgataataccgagtacaattggactctgacctaataaactaaatattgctgaacctaaaaacaatactaaaaaacatgatactaatcttgaaataatcgcttgtagcgaatgtacttttgtatgtttaatacataatacgactaatatggcgcttgaagcataattatctaaacctaacagcttactaataattacacctaaagtcatacccactgctgtttttattgttctaaatccaatcttgtaaggatttaactttaacatgggttagcgcctcttatctttcttcacaatatttattgaataatgtttgtaattgattaattacgttcatcacatcatgaccttcgatttgatgtctttcaatcatttctgtaatctttccatcttttactaatgcaaatgacggacttgaaggcgcataaccttcgaagtattcacgcgctctttgtgtcgcttctttatcttgtccagcaaatactgtcactagacgatcaggtaatacgtcataatgtaaagcatgtgatgctgctggtcttgcgataccacctgcacaaccacatacagaattgatcataactagtgttgtaccatcttgtttaagaactttgtcaacatcttctgcagtagttaattgctcatatcccgcagattcaatttcattccttgcttgttctacaacaccgttcatgtataaatcgaaattcatgtccataagttcaatcacctatccctttatatttaaactatcctcattctactaattaataacatattgttcaataaactaatctgaatcacacctatatttagacacaattttaacaatataccaaacattattgtgcttaaaatcatggtaactaatttgttcacatgttttcattaatatgtttcaagtatgatgtcttattttgactttactgcaaaaatgcattcaaccatgttgattattgttctttatcttttttgaatatattgcacatattttagtgccaaaaaataatacatccatcgacaagaacaagataaaacaagttgtcgatagatgcatctatgttatcactaatatatatttgtattttctaaagtatactgttcgatacgctgtttaatatgattcataaatttacctgtttgtaaaccatctaaaatacgatgatcaattgaaatacataaattaaccatgttacgaattgcaatcatatcattaattactactggctttttaacgattgattctacttgtaaaatcgctgcttgtggatgatttataatacccattgatgatactgaaccaaatgtaccagtattatttaccgtaaatgtaccgccctgcatatcttcagctgtcaattgcttattacgcgctttcgttgctaaagtattaatttctctagctatacctttgattgacttttcgtctgcatgcttaatcacaggtacgtataatttattttcatcagcaacagcaattgaaatattaatgtctttatgtaagacaatttcatttccttgccagctactatttaataaaggatatgcttttaaagcatctgctacagcttttacaaagaaagcaaagaacgttagattatatccttctttatttttaaagctgtttttataatgatttctcgtattcacaagatttgtagcatctacttcaatcatcatccatgcatgtggaatctctgttacactattaaccatattttgcgcaattgctttacgcacaccatttactggtattgtgctgttttcactattgtcttcagatgattggttacttgatgtatctactgatgttgattttgtttgaacttgtttgtcagattgagctgtggtaccaccattttcaataactgacattatatccttcttagttacacgaccttcaaatccactacctacaacttgtgataaatcaatgtcatgctctgaagcgagtttaaatacaacaggtgaaaagcgaccattattacgaggttgattttgtttagcagtaaatgtctgttccactgttgcactagcttttttagtagatttctgagtatgctcatccacttttgcttgtatctcttcagttgtttcatttgtcttttcatcagcagtttcaattttacagataattgtatcaatagctactgtctgccccgcttcaactaaaatttctgtaattgttcctgatatcgtggaagggacttcagctgtcactttatctgtaataacttcacataatggttcatattcatcaatatgatcaccaacagaaactaaccattgttcaatggtaccttcatgaacactctcacctaacttaggcattgttatttccatgactttccctccctagaattctgctaattcacgcattttatttaagattttttctggattcatcataatttcattttctaatacaggagaaaatggcatagatggtacatctggagcagctaaacgcatgattggtgcatctaaatcgaacaagcaatgctctgcaataatcgctgacacttctgacataatactaccttctaaattatcttcagttacaagtaaaactttacctgtatttttagcacgatcaataattgtttctttatctaatggataaacagttcgtaaatcaacgacttcaacgttgataccgtctgcagctaaaatatccgctgcttgtaaacaataattgaccattaatccataacaaaatactgttaaatcttcaccttcacgtttaacatctgcttttcctaaaggtacagtgtaatattcttctggcacttcttcctttaagaaacgataagcttttttatgctcaaagtacaatactggatcatttgattcgatagatgataataaaagccctttagcatcatacggtgtggaaggaataacaattgttaaacctggtgatgaagcaaatatactttcaatactttgtgaatgatatagtcctccgtgaacaccgccaccaaatggtgcacgaatcgttaatgggcattgccaatcattatttgaacgataacgcattttcgcagcttcactaataatttgatttgtcgcaggtaaaataaaatctgcaaattgaatttctgcaattggtcttttacctaccatagctgcaccaatggcagttccaacaatatttgactcagctaatggcgtatcgataactctgtcttcaccatattgttgttgtagtccttgagtagtaccaaatacgccaccttttttaccaacatcttcaccaagaataaacacatctttattttgttgtaatgctaagtcttgtgcctggcgtatcgcctctaaataagataatttagccattagttaagactcccttcttcgtacacaaatgcataggcttcttcgacacttggatatggcgcgtcttcagcagcctttgtcgctttattgatgatgtctttatgctccgcttctatttctgccaaccaagcatcatcgataatgccagctgaaagcaactcttttttgaacttttcattgcagtcagcttttttaagcgcttcacgctcttctttcgtacgatattggtcgtcatcatctgatgaatgagctgtcatacgacttgttactgcttcaatcaaagttgaaccttgaccagaaatagctcgatctcttgcttctttcatcgctttatacattgctaatggatcattaccatctacttgttcaccatgtataccgtaaccaagtgctctatccgataatttttcagctgcgtattgtaatgaatcaggtactgaaattgcatatttattatttataatgacacatacaaaaggaagtttgtgtacacccgcgaagtttaaaccttcatggaagtcaccttggtttgagctaccttcaccaacagttgctgttgcaattttcttcttaccatccatttttaaagctaaagcagcaccaacagcatggggtatttgagttgctaccggtgaactttgagacaaaatattcttagctctactactaaagtgtgatggcatttgttttccaccagagttaacatcgtctttctttccaaacgctgataaaaacgtatcatacgctgagatacccatataagtaacgaaagctagatctctataataaggcgctgtaatatcaccttcttctaatgcgtatgccatcccaatctgagttgcttcttgtccttgaccacttacaacaaatggaattttacctgcacggttcaataaccacagtctttcatctatttttctacctaaatccatccatttatatattacttttaggtcttcttcgctaaggcctaatgatttataatcaatcatgttaaatcctcctatttatacgtgaatagctctactttctgctttcaatcctaattccatcaacacttcagagatggaaggatgtgcgtgtgttgttagtcctaattctaatgccgagccattcatgaactgcaacagtgatgcctcattaatcaattctgttacatgtggaccaatcatattaatacccacaatttcttcagttgattgatcaatcaccatttcgctatacccttcgtttgtgtcatggctatcaatcactgctttaccaattgctttaaatggtactttaaaacttttaactttcattccctctgcctttgcttgttcaatgtttaaaccgatagaagcaatttcaggttgtgaataaatacacttaggcatcatgttatagtttactgggattgggttcccctcaaacatatgatcaacagccacaacaccttcttttgatccaacatgtgccaattgtaattttccaatacaatcaccagctgcataaatatgtttatcttcagtttgttgaaattcgttcgttaaaatatgtcctgatgttgaaagttttattttagtgttgtttaaacctatatctgatgtgttaggttttctaccaatcgatagcaacactttatctactttaattatgtctgaggaaatttcaaacgtaacaccatcttcgttaacatttatatcattttcagaaagttttattccctcatagaatttaacaccacgtgctgacaatgatttttttaatagttgtgaagcttgtttactttcagttggtaaaattctttcacctgcttctataactgttacgtcaacacctaaatctatcatcaatgatgcaaattccattccgataacaccaccaccaataataccaatacttgatggtaacgtctttaatgataatatatcatcgctagataaaattttatcatgatcaaatgataagaatggcaactctgcaggcgaagaaccagttgcaattaatacaaattggtttggtaataagtctgattcaccatcttcatattcgacagaaattgtgccactttgaggtgaaaatatagatgtacctagaatacgtcccgtgccattataaatgtcaatgtgattgtgttgcattaaatgctttacaccttgatacatttgattaataatgtcttcttttcgtgccaacatattttcaaaattaacattagcatctttgacatcaacgccaaacattgctgcctgttttactgtttgaaatacttcagcagatttaagcagcgatttagtaggaatacaacctttatggagacaagtacctcctaatagttgtcgttctactattgccacttttttacctaattgagacgcacgtatcgcagcaacatatcctgcagtacctccaccgagaacgactaaatcatattgtttctctgacatgttcttactcctaactaatgatatatatccattgaaaatttattaatacatagttttcatgtccattaattacctattttacatgattgtctatttagtttgaatgcacataaataaatccataaatgagtattcaacacactttggaaattatctacgtctttgattgtgttgtatcatttctcttgcattttctcgagttaaatcagtaacacttgcacctgaaatcattcgtgcaatttcatctactttatcatcgctaattaactcttgaacttgtgttgttgtacgatcatcttttgatgatttcgaaattaataaatgatggtcgctcatcgatgcaacttgtggtaagtgagagatacaaataacttgtatatattcagctatatctcgcattttctctgccattttttgtgcagcttgtccagatacacctgagtcaacctcatcgaataaaattgcagtttgacctctcgatttaacaaaaatactttttaacgctaacataattctagaaagttctccacctgacgcaattttatttaaactttttaatggttcccctttatttggactgattaaaaattctacaaattcgattccatcaatattcggttcttctaattttttaaatgaaatctcaagatttgcgtctttcatttgtaagttttgaatttccgatacaatgtggtctcttaactccctagcgactatacgacgctgctttgataacgcttgtccaacctctataacttgattatacaatgcatttatttcttctcgtaactgcgatgtactttgttcatagttttcaattttattgatttcattattaagcttttcttgatatgcgattaattctgaaatatcttttccatatttacgttttaaattattcagcaaattcatacgagattcatactcgtttaacacttgttcgtcgaattctgtattagccatttcatcatataactcatgttttgcatcttctaaaatgtagtaaaattgatcaatatcttcttttaatttgtcatatttgtttggaactatatcgtttattgttaacaaatggttgcttagttcatacaaacgatcagtgatagcattttcatccgttaatgtcatatgtgcgttattaagcgctaagcttaatttttcagagttttgaatgcgtttaatatctatttcaagttgctctatttcgccttcttttagatgtgcttcagacaattcttctaattggaatttcattaaatctaaacgctgcagcaatgcttggtctgctgattctaaatcttctaactcttgctttttggctttataattttgaaaagtttgatgatatttatccaacaaatcttgataacgtgattctgcgtaattatccaataatgttaaatggtatttttgtttcaacaaagactgcgtttcatgttggccatgaatatctaataattcttgcataacttttcgtaaatcttgtaaagtaactgtttgattattaattttacaaagacttttaccagagctgaaaatttcccgtttaactaataaaaaatcttcatctacatcaatatccatatttttcaatatatgtatagcatctttactctcgtcaatatcaaatataccttcgatgacagcctttttttcaccatgtcttacaaaatcagatgaagctctcattccaattaattgtccaattgcatctataataattgacttacctgaacccgtttcaccacttaaaacagttaaaccatcagaaaattgaatttctaactcttcaataatagcaaattgcttgattgataaggtttgtaacataaactcatcgcatccttataacaaattgaaaattcttgacttgatttcatcacttgcctctttgcttcgacaaataattaaacaagtatcatcaccacaaattgtgcctagtacttcttcccaattgatttggtctaatatagctccaatagattgtgcattaccaggtaacgtttttagaacaagtaaattatcagtaccatctatattaacaaaggaatccattaaataacgtcccaatttttctaaaggatggaattttctatcatttggtaaactataaacatattgacctgaaggtataggtactttaataagttgtagttctttaatatcacgagaaacagttgcttgagtgacatttaaatcataatcgtttaatcgtttaactaattcatcttgtgtctctatctgttcatttgaaataatttctctaatttttatatgcctaaccgattttttgggcacagtaaacacctctgattacgaatatttatacatttattttaacacatgcactgatttacgactactaaacacctttacgtaaaaagggtaaacatggtttatctatcttggttatctatttataaatatttttcatattacgcataacaattgcttaaaatatgtataaaaatgaatatatgtgtaataaacttgctaattattagatttaataagcgtcaattgtttgaacatatttaattaaaatcacattgatatcacagatacgaatattgtcgtatagaaattgaaaattctattttttaaatgaaagtcttcaacataattttaagtttcaacatgagaaaaatcgattaacaaacaacgtcagttgaatatgccttttgagacatttcaaactttacaattgttgctaatcgatatatttgcttttagtgatccctgctataaaataaatcaacgatttctaataagtgttttgtattgaattgttcatcaatttgcgttagttcatccactgctgcgtctctatgataagtcaatttatcttctgcgccatctttccctaataaactcacgtacgtacttttattattttcaagatcgctgcccacttttttacctaactttgcttcatcaccatagcagtctaataaatcatctttaatctggaacatcatacctaaatgataactataactttctaaatgttctttagttgcatcatcgacattagcgatatctgctgcactcataaccgcaaaagttaataatgctcctgtttttgttttgtgtatcatttccaaagtttcaagatcaattggttggccttcgctttgcatatctaacatttgaccgccgaccattccaacatgaccacttgctattgacagccgttgtagaacttttatttttacttcatcagttaatctatcatcacttgaaataagttcaaatgctttagttaataaagcatcacctgctaatatcgcagtccactcaccatatactttatgatttgttaattttcctcgtcgataatcatcattatccatcgctggtaggtcatcatgaataagtgaatatgtatgaatcatttctagtgcaattgcgctcttcatacctaactcatactcggtatttagtgaatctaaagtgagtaataacagaactggtcggatgcgtttacctccagcatttaatgaatacaacatactttcttctagctgagtatccattactgatttatttatcgcaaccgataattcattattgacttcatctattaatttattcatcggtagattcgtcattttttacatcctcagcttcttcttttattaagtcattcacctttttttcggcattttttaaagttgtgtcacaagctgctgatagtttcataccacgttgatataaatctaatgattcctctaaagatactgtttcattatctaatttttgaacaatttgctctaattcttgcatcatttcttcaaaactttgcgtttctttagtcattattacaccttactttcgtaacttttgcatctactaagccatctttcattgttaacgtcaattgatcattttctgttaaatctttagtactcgtaatgacttcgtcttttttattaacaattgcatatccacgcaacattgtattagttggacttaaattgtttaagttttctactttatttttcaaatcatttttataacttaatatcttagaattcaataatttaacaagttggtttgtcaattgaagattattttgttgttcttgattaacactacttagtaatgcttttaaattataacgttgttgcaacagcattaatcgatgtctctgttgttcaaaagttgcctgaatttgttgtttcagtctcttttctaaatcatctcgacgttgtatctgttgatcatacaataaagttggttgtttaaacttgtaatacgatgacaaatgttcaacatgtttacgttgttgttctaaatgtttcttgatgaaacgagtcaatgtaaactgatattgctgtatttgttgcagcaattcatattggtctggtgttgcaataacagcagcttgagttggagtcgcagctctgatgtctgcagcaaaatcacttaatgtaaagtctgtttcatgacctactgctgatataatcggtgtcttacaattatatattgcacggacgacagcttcttcgttaaaattccataaatcttctatggatccaccgcctcgacctacaataatggtatctacacctaaactatctgcatattcaattttttcaataatgtcgtcctttgctttttcaccttgaaccaaagtactaatttgtatttgttcagctaatggaaaacgactatttatcgttgaatggatatctcgaattgcggcacctgtactcgctgttaaaactgcaatttttttaggaaacttaggtattgatttcttattcgctttatcaaaacaaccttcttcagttaattttttctttaatgcttctaatttttgatataagttccctataccatctaattgcattttatttacataaatttgatagtttccacgacgttcaaaaacagaaacacgtgcttctaataagacttcatctccttctttaggttcgaagtttaatttagaagcactacctttgaacatcatggcacttataacgctttctttatctttcacattaaagtataaatgaccacttgaatgctttttgaaatttgaaagctcacctttaatcaatacagattggagatgtggatcttgatcaaatttatatttaatatatttcgttaaagctgaaacacttaaataatctgacatataacatcactcaattttatttttttatattactcaatacaccatttataaatttataatgatcatcatcactaaattgttttgttaattcaactgcttcattcattacgactttagcaggtgtatcactgtgtaatatttcatatgttgccattcttaaaataatacgatccgtttttaataaacgtgcaatagtccaatcttttaaataaggactaattgtctcgtctaatacaggttcgtgatctttaacgccagaaactagccaatgaataaattcgaagtctaaatctggattatcgtctttaataaagcttatcgcttcatttatcgttaaatcactgtccttcatttctaattgaaataaagtttgaaaagcttgcactcgggattctttacgactcatttttaactccttcaaacgtttgtatttttctttatttaattactgaattaggtatgacattacttttcaataacgatttgtgtaatgtgaatattaatttgcttaggttctatcgctgtcatattagaaattgaattaaaaattgacgtttgaattttgtttgcagtttttgaaatattaacaccatgttttaatgcacaatatacatctatatatatgccatcttctttactctcgatttttaaatcacggcttaaatttttacgactaactttttctaaatttgtttcttttaattcagcaaaatggccagtgatgccttcgacttccgaagtagctatacttgcaataacagatagcacttctggcgctatttctactttacctaattttgaatttgaataatcagttactttgaccatggattgacctcctattaaccttcatcattcataatgctattttgctctaaaaagtttgtattaaatttaccgcttctaaatatatcgttattcaataatttaatatggaatggaatagttgtatcaataccaagaaccacaaattcacttaatgcacgaatgccagccataatcgcttcatctcgtgtcggttcatgtatgattaatttcgctaccatcgaatcataatatggcggtatcgtataattagtataacatgctgactctattcgaacaccatatccacctggtgcaagatattgctcaattttacctggtgatggcataaagttcttgtaaggattttcagcattaattctaaattcaattgcgtgtcctgttaatttaatatcttcttgtttatacggtaacacgtcacccatagcaacctgtaattgtaatttaactaaatcaattcctgttaccatttcagttacaggatgttctacttgaatacgtgtattcatttccataaaataaaatttattatcatttaaatcatatataaactcaattgttcccgcattttcataatttacagctttcgctgcacgcactgcggcatttcccatttcacgacgtgtttcatcatctaaaattggggaaggtgcttcttccactaatttctgcatacgtctttgaattgtacaatcacgttctcctaaatgaattacattaccatagctgtccccaacaatttggatttcaatatggcggaagttttcgatgaatttctccatataaagtccaccattaccaaatgcagtttgagcttcttgttctgtcattcggaagccagtttcaagttctttttcatcacgagcaacacgaataccttttccgccaccaccagcagtagctttaatgatgaccggatagccaatttttttagcgattttcttagcttctgagacgtctttcattaaaccatcactaccaggaacaactggaacattggctttgatcatttctgccttagcaacatctttgatacccattttttggatagattgataacttggtccaatgaacttcaattggcatgcttcgcataattctgcaaagtcagcattttcagctaaaaagccataacccggatgaacgccatcacaacctgtagaagttgcaatagataagatgttcggaatatttaaatatgaatctttagacaaagtgggacctacgcaatatgcttcatcagcaatttgagtatgtagcgcatctttatccccttcagaatagattgcaacagtttggatgcctaaatcacgacaagcgcgaataatcctaactgcgatttcaccgcggtttgcaattaaaacctttttcattatttcaccttaaataacggttggccatactctaccatttgtccgtcttctactaagatttcaacaatttcacctgaaatttctgcttgaatttcattaaatagtttcattgcctctaaaatacacactgttgtttcatttgaaacagtgtccccaacttgcacatatgcttcttcgtctggagatggcgatttgtaaaatgtacctaccataggtgcattaattgttttgtgattatctgaagttggctttggagcttcagttttattgctatcagttgattgtacttgaggcataggcattgccgcagcttcaactggcatttgtgagatttgtggcgtgataatctcagtttctttttctttcttaagcgtcactttgcctttagtatcttcaatattgatttccgttaaagttgatttatccagaatttcaattaattctttgatttctttaaagttcattattactgactccttcagtttgttttcatctacccgtctattttacttgagacaactcttcaattcaagcatgttcatattgctggcgacattataagtctatcccaaagatataataaaaacacattttaaattaaaaacacttgtgtatttattacttaacattgactcatcttaactcttgattaaaaattttatgcattcagttaaacatatcaatgttatttttattagctattatgtttaatcctcaacaatatgatatgtagatatatacctttactcatgtctatgttttttcactaccaattagacgattcgttttatattttaaaaattattttaaaaataaaaagcctcatatcagcatataacctataatcattttaggcaatagctttatgagacttatttagaatatcttacgttaaatcagtatagtgaatacaagctatttgttaacaaattagagattatcctcttgaaatgtagcttccatcaccagtgttgataattaaaacgtcaccttcgtttacaaataaaggtacatttaatgtataaccagtttcaacagttgccgatttagtagcaccagttgcagtatcacctttaataccaggttctgtttcagttactgttaattcaacagttttaggtaattcaacaccgatagtttcaccttcgtatgtttgaatttgtacttccataccttcttttaagtaattcaattcttcttttaagtaatcacttgaaagttctgtttgttcaaagctttcattatccataaatacatgattatctccgtcagcatataaatattgcatgcgacgattttcaatcattgctggttcaactttttcaccagctctaaacgttttctcttgaattgcaccagttcttaaattacgtaattttgaacgaacgaatgctgaacctttaccaggctttacatgttggaagtctataactttccaaatagcgttatcaacagaaattgttaaacctgttttaaaatcattaaccgaaatcattcagtttcctcctcattttacacgcttatgttaaaactataaggtcttttgtgcatttagtaaagacttgacaaccattttctgtaattaaaatatcatcttctattcttataccgcccaaaccttctatataaacaccaggttctactgtaacacagttgttaacttgaagtttatcttgtatcgtacgagccagcattggcccttcatggatttctaaaccaataccatgtcctagtgaatgtccaaattcttttccatacccttttgactctaaatagtttcttgaaatggcatcagcttctgcaccagtcatgccaggtctaatctcattaattgctttcatttgagattcaagtactatttgatatatttctttcagtttaggatctggttctccaatagcaaatgttctagtaatatctgaacaatagccgttataatacgcgccaaaatctaatgtaatcatgtcgcctttttcaataattttgtcacttgcaacaccatgtggtaatgcacctctatgaccagatgctacaatcgtatcgaatgatggtccatctgctcctaattctagcattttactttctaatattgcctttaattctttttcagtcatacctgcttttacaacagttaaaatatattcatatgtttcatcaacaatattagctgctttttgaattaaagcaatttcctcagcatctttgacgtctctaattttatctacagtattagaaatgcttattaatgatatacggcttttatttaattcaaggtatgtatcataacttacatggtgcccctcaaaacctacattttcaaaattttcttggtgtagcaattctttaatctcaccaataatagtagatttacgattaataatttcataatttggcgcttgcttagttgcttgatcaatatatctaaagtctgttatcaaatattgtttatctttagatatgataagtgctccactggtaccagtaaaacctgataaatatcttctattgtaatccgaaagaatgataatcgcatctaaatgtttttgttctaaaatacgatgcacttgtgttattctgctcatcttattacctcctagtgaaacgtttgtgcatttcaactttatacattaaaataatatcataatgaggataaaaaataatagatattgattttagggagatagtaatgaaaaaattggtttcaattgttggcgcaacattattgttagctggatgtggatcacaaaatttagcaccattagaagaaaaaacaacagatttaagagaagataatcatcaactcaaactagatattcaagaacttaatcaacaaattagtgattctaaatctaaaattaaagggcttgaaaaggataaagaaaacagtaaaaaaactgcatctaataatacgaaaattaaattgatgaatgttacatcaacatactacgacaaagttgctaaagctttgaaatcctataacgatattgagaaagatgtaagtaaaaacaaaggcgataagaatgttcaatcgaaattaaatcaaatttctaatgatattcaaagtgctcacacttcatacaaagatgctatcgatggtttatcacttagtgatgatgataaaaaaacgtctaaaaatatcgataaattaaactctgatttgaatcatgcatttgatgatattaaaaatggctatcaaaataaagataaaaaacaacttacaaaaggacaacaagcgttgtcaaaattaaacttaaatgcaaaatcatgataggagtcttttaatgcgtaatataatattttatcttgtacttattattgctgcgattggattagtaatgaatctagatgcctttattttttcaatcgtcagaatgttagtcagctttgctgtaatagctggtattatttatctgatttattatttcttcatcttaactgaagaccaacgcaaatatcgcaaagcgatgcgtaagtataaaagaaatcaaagaagaaaatagataaaaaaatggaagcacttgtaggtaaaatagtctacgtgcttccattttttattctaaaaactactttctaaacatccattcatctgaacgatatttttcagttaattcttccacttctgccaattgagcttctgttaattcaagtggctttaattctatatttaaacctttcttaaaacctttctcgaaagcttcttccatttgactaatagtaatgtgtttatctgaaatatcattgatggcaactgctttttcaacgaatgcctctttcatttttaattttaatctttcatttttataaataaacatatcaaacagttcatcaatatcaatatcttgtaaaatcgaaccgtgttggaggattacgcccttttgtctcgtttgagcactcccagcaatcttacggccttcaacaactagctcataccaacttggtgcatcaaaacacactgaacttcgaggttgttttaatttttgacgctcttcaggcgttttaggtaccgcaaaataagtattaaatcctaagtttttaaatccttctaataatccttgtgaaatcactctgtacgcttctgtaactgtagaaggcatattcggatgcgattcaggcacaatcacactgtaagttaactctttatcatgtagcaccccacggccaccagtttgacgccttacgagaccaaaacctttctctttaaccttatcaatatcaatttctttttgtagcctttggaaataccctattgataatgttgcaggattccatgtgtaaaaacgtataactggatcaatttcacctctagagacaaaatttaataacgcttcatccattgccatattataatatgggtctttacttcctgtattaataaaattccaagtttcagtcatattcaagaactcctatcagcaaaatgtataatatttgattcgctaattaatcaatttaactaaatgaataataattgtaattctttagtgaaatattttgataatttgacctaacagtcttataattatattatcgtttaattagggaggatgcaagatgagtgctagtttgtacatcgcaataattttagttatagcaattattgcttatatgattgttcaacaaattcttaacaagcgagctgttaaagaattagatcaaaatgaattccataatgggattagaaaagctcaagtcatcgatgttagagagaaagttgactatgactacggtcacattaatgggtctcgcaatattcctatgacaatgttcaggcaacgattccaaggattaagaaaagaccaaccggtatacttatgtgatgccaatgggattgctagctatagagccgctcgtattttgaaaaagaatggatatacagatatctatatgttaaaaggcggctataaaaaatggactggaaaaataaagtctaaaaaatagtttttgtaaatttaatatacgatttaataaaatctgagtgttaattgatcatcaataacaatactcagattttaattttttaacaaagtctgttactatatttctctagcttcactgatcattaaacttagtttcagcataataaagaaagttcagctcattttcaatacgattcaattaccgcaatctaaaaaatgaaaagacaatttctatgaaagaataataccaaaccctaagagttattacttcggtttagttttcttgtttaaatagaaattgtctttttcaattgattttgaaaccattatccttaaatcttcatacaaagttagaataataattctcggaatatgtgtttaatactttatttttcctgtttaagattttcaaactttaatattggtttacgagcagctgtagcttcgtctaatcgatcaatcacagttgtatgtggtgcttctagcactttatcaggatcatttttagcttcttcagcaatactaattaatgtatcgataaaataatcaagtgtttctttagactctgtctcagtcggttcaatcatcataccttcttcaacatttaatgggaagtatattgttggtggatgtacaccgaaatctaataatcgcttagccatgtctaaagtacgtacaccaaattctttttgacgcacaccacttaacacaaactcgtgtttacaatattgtttataaggtatttcaaagtgtttagataaacgtgctttaatataattcgcattaagaaccgctgcttcagaaacctctttaagtccagttgctcccatagttcgaatatacgtataagctcttaagtaaataccaaagttaccataaaatggttttacacgtccgatagaatttttaatgtcattatcatatttaaatttgtcgccatctttaataaccattggctttggtaagtaacttgctagttcttttactacaccgactggacctgaaccaggaccgccaccaccatgtggaccagtaaatgttttatgcaagtttaaatgaacagcatcaaatcccatatctcctgggcgaactttgtccataatagcgtttaaattcgcaccatcataatataatagacccccagcattatggacgatttcacggatttccataatatttttttcgaaaatacctaaagtgtttggattagttaacataatagctgctgtattttcatttacaacacgtttcaagtcatcaatatcaacttcgccacgttcgtttgattttacagtaactgatttaaatcctgcaaatgaagctgaggctggattcgtaccatgcgcagaatctggcacaatgacttcatcacgatgaccttcaccattattctcatgataagctttaaatatcatcaatgcagtccattcaccatgtgcgccagcagctggttgtaatgtcacctcatccataccagtaatttcttttaattcttcttgcaaactataaataatttctaatgaaccttgaacttggtcttcatcttgtaatggatgtgattcactaaatcctggtattctagcaaccttttcattaattttagggttatacttcatcgtacatgaacctaatggataaaatccgttgtctacaccgaaatttttatttgaaagttcagtataatgacgtactaagtctagttcagcaacttcaggaaactccgctttgtttttacgaataaatttatcatctaacaatgactcaacagaatttgttttaatatcactttttggtaatgaatatgcatatctgccttcacgagatctttcaaaaattaatggacttgatttactagtcatttaactcaccagccttttctacaaatgtatcgatttcatcttttgttcttaattcagttacagctattaacatgtgatttttaaagtcgtctgaaacaacacctaaatcaaaaccaccgataatattgtacttcactaattcctcgttaacttgttgaattggtttgtcaaatttgactacaaactcattgaaagatgtaccatctaatacttcaaaaccttttttaataaattgctgtttagcatagttagcatgttctatattttgaactgcaatatcatagataccttgtttaccaagtgctgacattgcaattgatgacgctagagcatttaatgcttggttagaacaaatattagatgtcgctttatcacgtcgaatatgttgttcacgtgcttgtaatgttaatacaaagccacgattaccttcatcatcttgtgtttgaccgactaatctacctggcactttacgcattaactttttcgtcgttgcaaaatatccacaatgtggcccaccgaattgagcaggaattccgaatggctgagtatcacctacaacaatatctgcaccaaatgaacctggaggtgtaagtaatcccaatgctaatggatttgcatatacgataaataatgcttttttatcttcaataaagctatgaatcttttcaagatcttcaattgaaccgtagaagtttggatattgtactgcaacagctgctgtttcatcatccactgctgcttctaattttttcaaatctgtaacagtgccatctaaatcgatttccactacttcgaattccttacgcgtcttagcataagtatgaagtacttgtaatgcttgataatgtaaaccttttgagactacaattttatttttctttgtttgactaaatgctaagatacatgcttcagcaaagctagtcatcccatcatacatagaagaatttgctacatccatatctgttaattcacaaattaaagtttggaactcaaaaatggcttgtaattcaccttgagaaatttccggttgatatggcgtatatgctgtgtaaaattctgatcttgaaatcatagcatccacaactgatggcgcgtaatgatcataaacaccagcacccaaaaatgatgtatgcgtttctttagtgatattcttgcttgcaatgcgatttaatcttctaagtaacgttgtttccgcttcgccttcagcaatatttaaatctctatttaataaaatgtcacttggtacatcaccgaataattctcctatagattttgcaccaattgtttgtaacatttcttgcttgtctttttcagttaaaggtatataacgatgactcacaatgcacacccctttttaattatttatcaatttgatttttcttaacaattttcgcttttaattgacgcttacgaacttgaacaagcaactctctacccatttcaaactcatctctttttatcattgcaagtgcaattgattttcctgatgatggagactgtgttcctgaagttacttctccaataatatttccatctaaatccataacttcataaccagttcttgcaattcctttttcaagtaattctaatcccactgttcttcttggtgcaccattttctttttgatcttttaatacagatttaccaataaaatcagcatcaattaatggtttacttgcaaaagcgataccaccttcatatggtgtaattgattcagttaaatcttgtccatgtaatggcaatccagcctctaatcttaatgtatcacgagcgcctaacccacatggcataacattatactctaataaaccatcccaaattttttcagtatcatcgatattacaataaatttcaaacccatcttcacctgtgtaacctgactgagataaaatgacgtttgctccaaataatttgacaccctgtttaaattcaaacattttcatttcagttacatcttcatcaactaattgattaattaaatctctagcttttggtccttgtattgctaattgaccatattggtttgatacattttgtacttcaacatcaaatttctctttgtgttttaaaatccaattaaaatctttttcagtattagcagcattaacaactaataaataattgtcgtcagctaatttatatattactaaatcatcaataataccgccttcttcattacataaagcagtatataatgcttttgaagtagttaaattatcagtatcatttgataataaatattgcacaaactgactagcatctttacctgttacttcaatttcacccatatgactaacatcaaacaggccaatttcgtatcgaacagcattatgctcctctttaatacttgaaaattgaacaggcatcgcccatcctccgaattccacaatttttgcacctctatcaacataattttgatataaaggtgtttgttttaaatcacttgacattgaaatacccccttaaaattataaaaacaggatagcaatcgctaccctgtttataaatcaccaattcaggaacgcgttacagtattatccttttgcctgagagtttcgtaataaattacttgcaccttcggcgatagagtcttaacgctctattctctctaatactgatcactcgcttttattaaatttagcaattcataatatatttctgaaattgatagcaaatgactatcaaatttcttgaatgcgatttcattatatcttaaattccgcgagcaatacaagtcatttaactgcttgattgtcttattatttgcattaggtcgatgtgggtcatcattgattcgactatatataatatcaatattacaatctaaccaaataatgtttttttgatttttcaaaaaattaaatgcctcttcactctcaataataccaccaccagtagcaattatatctgcagtgttaatacattcttgcaaacatgtgaactctaaattcctgaaatattgttcaccatgtttactaaatatttctggtattgttaacttatacttctcttcgatatatgaatctatatcaataaatgataaattttgctcatctgcaacgtatttaccaatcgtagatttaccggtacccatgaaaccaattaaaattattggtgatttatcatgattcatgcgttttcccttctttcaataacaaaacaatcttatagttatagtcagtttcaatattatataatgtctttaattttaaactatattgactgatataaaaagtgaaaatggaaaaataaattgctgttagcatcaataagaacggcgtaacatatcctttttctttatataaatcaaaattaataaattatttcacatcctttttaatggtactcatttaaatactagtaagttatacataaatagttttagtctgcacatttgtaccgactttaactgttatcgttattttaataatggatttatagtagatatttgcagtaaatgctgtaacattattaatcattgttatatttcctctgtcatttacaactttaataattttattattaattaatttgtattcgatcatttcttcacctttatgtaaaatgatacggtgttgcctaatttcaatatcgtttctatctactcctttaaaatcatctagaatatctcttgagaaaaattcgaaatctacagttgttaaatccctactttcaattagaaaagttttactaagtctaattaagtctggaacaattagtaaagttatacttataaccatcatcgctactaacatttcaatgagcgaaaaagctttgacattaatactgtatacatgtcttttgataagaagtggtattttttgaaatagcacaaatttgttggtcactttgcttaatatcatacttccctatagttacccccttcttaagttcttctttattaattttagatacagtcgtcaaaattactttagaagcatcaattgtttgtagtttatggtttatactcgcttgcatttgattcatcattggtatcaatagtaatgtaatcaatccaattagcaaaaatccagccatactatctattaagaatgaacctttacacttatagcttttcataacgaattcttcctttttcaatatggaatattattctataaattgaattgttattgtcaattgttatgctaccaaatttattgatattcccttttttatcaaaggcaataatatcaacttttgcaacattaattattttgcctacttttaattttagaaatcgtattttattattctctattactttaatagtgtcactgttttcataaaatctaacattgatatatccttgatttgctatagcttgcgacttaatataattcaattcagtaataaaagaaatgatatttgcctcatcatctattactctaagattgcttaatcctttagatgtcattgtcaaaagtagaaatatactgattaacatcattaccacaagcatctcaatcatagtaaatgctgactgctttctaatttgcaactgcttctccattactaattgtgattgtctctcctgatttacatgtcttttgtgcttcttttataaaaccatctgcaattaagtcttcaatagacgatggatttctattatgtttcaatgcatacgcttcaatttgactattaaccatttttacctgtgcattacaacctgttgattgtatgtgagcagtttgtttagcaatatttggaatgattaaaattaataataaactgatgattaataacactaatagcatctctatcaatgtaaacgcttgagttttcttaagaaatttaaacatatattaacctccattattttatactttgcatcatttgaaacattggtaacataattactaaataaattgcgacaataaataaacctaaaatcaaaaataaaataggctgtaaaaactgagtctgttttatcgctttatcttctatttgttttactaatatttgtgaatataactttagttctacttctagcttccctctcttttcaccttgtagcacaaacttaattaattgaggcttaaagcattttagtttttctaaaatttgaggcaaaccatatcccatttctgaataagttaataagtatttacctagaaactgtctaaatggatcactactatggttaatataaacgtctactattgattgaagtgtaataccatttttataaaacaacactaattcattagttacaaaataagttttaaataattggaaatagcctgatattagcggtagtttcatcacaaagtttatcttattgagcatatttaaattgttataaattaatttcataataatagccaacatagatactattatgagcattactacaattatagtaggtaagctggtaatgaaaaaagacaatgttttttgaaaagaagatagttgaatattcatagaagtatataattgttgaaactgtggaattactgtgaggtttaatataataatcatagcaataaagatagaaactagtattaaggggtattgcagtgtctttaacaatcgttgttctgactttctattcactttcatataatttacggtttcttctagaacgtctataatattgccaaatctttctgccaaatatacttgcatgacgatagtatcgctataacctatcagtgataatatttgattgcatggtgcaccatttgaaatttcacttagaatggtggtacctaattgcttatttttatatgtcatttgaagatttaaaaattgaaaactttgatacagagtgaaaccatatttcaacaaattacataaatttgaaagtaaatcgatttgttgggccttacttaattgtcgcttcttagaatgtagtttaaatgtatttatccattgtagtttcacaaatgacacctgcttttgtcatatcatcaagtttatcttctaagttcttaaatgatgatggtaatgaatgattatgggaaaagaaatatcggagttgttgctgagatagaatttcgcatactaattgtcgctgttgcttaatagtagttacaagtcgttggtttataattaagttagttgcctgtatcaattcttgtacagaaatgcccatttctaatagccttaaaatagcacctttacaatcagttgcatgcaatgtagtcagaacaaggtgaccacttaaactagcctgtataacacacttggcaacatctttatctctgatttcacctattaaaataacatcaggatcacatcttaaaatagctttaaacgaatttacatagttaatgccagctttatcattcacattaatttggacgataccaggaatttgcatctctacaggatcctctatagaaattacatttaaattcaaggctttattcgcgtatgagaccatttgatacattaatgtactctttcctgaaccagttggcccactaaacaatagtaatccttgtttcttattcatgaggtgtttaaaatcattgaatttataagttgatttttgttgttgaaaaaattgaggtacaattctgataacacaactttcttggccaagtgacaatggtaaagttgatattctcaaaaaatatattttattgaaatggtaactatatcgaccgctctgtgcgacttgctgtgtagaaacatcaagcccagcttgaaacttcatataaactaataacttttgataaatgctattcccaatttgttcatactgctccaagttatcattaattctaaatttaatacttacttcatttttaactggaataaaatgtacatcactcgctttcatttctatcgctttattaattatttcttgaaatagaatcttcaaaaaaacacctcctacatataatcacgtaggaggtgtttttattacttcaatttaaccgtgtaaaaatggatttaattgttcatcatcaaccgtcgtatatggaccatgtccagggaataaaggtaaatcgccttctaattcaaatattttatcttgaatagaatcaactagcgtttcataatcacctttatataaatctgtacgtccgattccattattaaataatgtatctccaacaactgcgaattcatcgaacacatatgttaaacttcctggtgaatgtccaggtgtgtgtaacacattaaacttaaatccttctatttctgtgctaccttcgtttaacttttcaggagttaccttacttgtaataattggtaatccatattgcttaaatttatctgccccatttttaacgggatcttttagaaaatcaaactctgcttcatgcatataaaccgggacatcgaatcgatcaactatatcatcgactgctccgatatgatcaaagtgtgcatgtgttaataaaatagcttttaacggtttatttatttggtttaattttttaataatttttccactttcacctgaagggtcaatcagaataacagctttgtcattttcgatgaaatacgtattagtatcaactaagcctaaagttaagcttgaaatcctcataggttttcaccactattttctaaatgtttttgtactgatgttagtttatcattcatttttctagatttgtctcgtcggtcatcaatacggatatttgtacaaactctacttaaacctttatcaaaaggtaattcatgtatcacttgcacaacttctaatacatcgcttaattcaccttcaattagagtattcattggtgttaattgaaaatcaattttacccattgctttatattcttgaagttttttctgaatatctgcaatatatttactaacactcggaccttccgttccaactggaataacaaccacatcaacaatagccattattttaccccctctttatctaatacataggtcttgattaatcctgctgctcctgtaatacctgcatcattacctaatttcgcttgtacaatttcagtttcaaattgagcaggtgcaaatgttaaattatgatattctgttttaatattttcaattaaaataggtcctgcagtagacattcctccacctagaacgatatatttcggattacttgtaacactaataatactacataaatatccaatatagtttgcaaccttttcagtaatgaaaatacagaattggtcaccagcttttgccgcatcaaaaacagcttttgctgtaaccttattttctttaatcaattctaatatagaagatctaaacgtcaacttcggatagtagaagttaactaagttaacaacgcctgtcgctgaagcaactgtttcaatacatccagaacgaccacaattacatttaaatcgttgatcgaagtctgctctaaaatgacctatttctgcgccagagccattatgaccatgtacgatttcaccatttgaaataattcctccacctagacctgtaccaagtgtgatggcaacaacatcatcggcaccttcaccagcacctttgtgtttctcccctaaagcagctatgttagcatcattatctacatacactggacaatcaacgaattgttcaaaaatctcacgtacattaactttttctggccaatataagtttactgctccatttactgtacctttttcaaagtcaacaggacctggtacaccaatacctacgccaagtacatttgaaaaattataattattttcatttactttttcaacaaacgaatcataaattcctttcaaaagtgtatatcctgtactatcagatgtatcagtgtgaatagaccatttatgtaattgttctaattcaggtgtgaaaatacctaatttacaagtcgtcccgcctacatcagctgctaaaataatttttgtcatttctgttcattccttctctgattaattatcaacgtacatttcaaatattcttccttagataacagttcatattgatacaatgatgaaatctcctgttgaatcatttcgtacatatcttctggatttttaaaatatattagaaatccgtaacttttcaataactgttgtacatcataaaagttatttatttttcgactcatttgatttagtcaactctttttctaagttaatataatctgcatttttagggtctgcatttaatgctttacgcacatattttaatgctttttcatcatcatttaatgaacgatttgctatcgctaactcaaaatttaataaacctgatttaggaaacattctaagtcctcgctcccattctgtcataccttcggacttagaattgatagtagccataatcataccacttaaataatatgtttgatcatcggcataatttttatttattgtctgcttcacaatattttgagcattatcataattaccactagtcatatcatctttgatcaatttattataaatattatcttctttaattgtaaaaattctaatttgaagtgcaataaatataacaagcataccaattagtaaaatccaaaaaatattacgattcactttatagtaatagccaattaaagttattaataaaccaccaatgaatcctccaatatgcgccacaatatttatatttgacataaacagagaaacaccaactaatatcactaatgcaattaataactgtcctaacatttttttgttaaatgtttttgaaacatacatcatcgcaaaaattgatccaatcagaccaaatatagcaccactagccccaactgaaattgtagtcgtattaaatgatagtgatacaaagtttccaaacaaccctgcaataaagtatacagttaacatccgccatgaaccaataattgcttcgactattttaccaaaaataaataatgaaagcatattcataagtatatgttcaaaactaaaatgtaaaaacatcgatgtaacaattcgataccattcaccatgtacgacattaaaatgcactaacccgccaacatctaataattttacatccgaaaaattatttaaatataaaatcatacataaccatattaagacatttacaaatattattgtgtatgttgccggtgaaaatttctgcatatatttatctaaaaagttatcggttaatactttgcgtttatagaacatatatgtctttttatcattatcttctgaaataagtctagccaaaaatatattcggcatatgctttatcaaatcttttgtgtgtcttataacattgaatttaattctaattggcgaaacttcatttaattgttcttctgaaaattccgattctgtaaaataataaaattcaaaactttgtggttcgaaagaaataaaatttgctatttcatctttgtgttcaagcactttcgctttgtcaaaacgtatttcttgggtagacttgatatgttgtttaaaaatgactacttgtttttttcttttatgggctaaccaaatttcttggtcatctttttccctactgacaatatcaaaattcaagtacctaatccaataatatattgttttccaaaattgtttgtctatgttcatttagtcctccactatgctgattgatatataatcaatttatcgactggttgatcgaatgattccggttcaaatgatgttatttgaaaatcgtataataagcttattgtctttgtctgataattagctaaaaacctgtcgtaatagccaccaccatacccaattctatatccatcgtcttgaaatccaacaccaggaacaacaattaaatctaggttattcgttgtttcaccttttgaagttggatagtaaatccccttattatcgacatcaatatctttgagattaaatatttctttaaaagtcatttgatgatttaaataatccattttcggtacaaaaatacgtttatgatccattaaggcttgttcaataatagaaaaagtatctacttcatgattaaaagaaagaactagcgcaattgcgtttgcttctttgtattcttcagttgcaaaaaattgatttcttaaccatgtgtctgcttttcgcttttcagctttattaaaattcttcattttatgtaaaatgtattttctaatctcatttttagtcacattatcacccactttattcaattctattatatcgttaataacaatacatgtcattatgttgtcatgatgaattatgcgacaattctaaaatttattatttcaattgaaaatcttttatcatttcatacgtgtgcataattaaaaaggtgaaacctcttattttgagatttcaccttttttattgttaatttaaatttaattttaatgattattttgtttcacggtgtaaagtttgtttgttttcacgtgaacagaatttcttcatttcaacacgttctggattatttcttttgttcttagttgtaatgtagtttctgtcaccacattccgtacaagctaaagttacgtttacgcgcatggttattcctccttatcatttctaaatacgactttattattataccaacatctataatatttgcaaagttaaaattttacaaccatgcgctacacaatcgtcaggttaaattttatttgtctttgtctttatttttatcatctttacctaactgcttaaagtagtagttaattacatctctacctaagtctccacctgttaaccatggtggtggtacaggctgatttgtatatacaattgaaaacgctaattttggatcatcaattggcacgtatcctatataagtagagttaactcttggctctccgttttggaacacttcagcggtacccgttttaccagcagtaggtactactgtatctttaaaactaacatatccagtaccatctttatcattaaatgccattttgaatccttcttgaatttgtttgatttccttttcagtattattaaccttgttcaagacagtgccattaattttcttcttgagtggaccaacctcatctttattagttgattcatgaatcgttaatccaatgtgtggctgtattctataaccatcattcgctatagttgaaacatattgtgataattgtaatggtgtataggtatcatattgaccaattgataaatctagataattacctggattatttgttaatggttcgatttgacctcttgtttcatttggtaaatctatccctgttttcacacctaagcctacttgatttaatcctcttcttagcttttgggcaggtgaacttatgtctgaaggtaaagccataccagaataataagggtctcccgctaattttaatgctgttttaaacatatatacgtttgatgaatgcatcaaagcttgcttatcattaatagatacatgcccgtttttattgaagtatgatcgttttgtcaaaccaccttggaaatgtaatggttcatcgaccattgtttctccaactttgatagctttattctgataaccagctaataatgttccaccttttacagaagatccaaccgcaaattgagaagtaaacgtaccaatgtcataatcagtcattttaccactcttattaatctgctttccggcaagcgcaagaatgtctccatttttaggattttgtacaaccatcattgcattatccatatctttggcaccttgactgcgaagcttcttaatttgtttatctaataatgcttctacttctttttgaagatctatatcgatcgttaatttcaaatcttgaccgcgagcgccaggatttaacacttctgaagatgtaactttaccagatttgtccgttgtgtatttcatttctttcttcttaccacgcaatacatcttcatattgatattctaggtaagattttccaacacgatcattgcgtgaatatcctttggataagtaatgttctgtcaattcttttggaataccttcagcaggtgtcgatacatctccgaatatacctcttaaagtatcgccatatggatattttctatcccaatccatagacgtgttaacacctggtaatttggaaagttgctgagaaactgctgcatactctttttcactgacatcttcattttttatcatttgtggatctaaaactgttcctgcattcatctctcgaaaaatagctaaaacttgtaaatctttagaagacaattcatctaattgtgattttctgattttcgataacagttgtttatcatattgatcttgtttaatacttccatctgctaacatagcttgttcttttgtcatcattgcttttgcttttttaggatgcaactgaatccagaaatctttcttatcacgttctgtaattttcttagtatccatcttgattagctttgataacttttcagccgtatccaacatttccgattgtgttgtttttcgacccctagtatatgtaatagccattttagaagcattatcaactaaaactttcccatttctgtctaaaatacgacctcttggcacagactcattcactgtaatgttttcatcattttttataatttgtttataatgtgagccttgtgcgatttgtaaataacctaaacgtagtactagtactgcaaaaataaatacaatcacaccaaatataaagttaattctcttgttaattgtattttgaacgatttcatcatttgatttttcttttagtctttttaacaaaactacctacctctattcaaagtctttcactttaaatcatatatgaatttagaaattatttctatctttttgacaaaaaaataacggtctcatttaagagaccgaacaagtaatcatactttattttgttgcattatataattcgtcaactttttcccagttaactacattccaaaatgcgccaatgtagtcagggcgtttgttttgatattttaggtaataagcgtgttcccatacgtctaaacctaaaataggtgttttaccctcagttaatggattatcttggtttggtgtagtcacaatttctaactggccattgtttacgactaaccaagcccaacctgaaccaaagcgtgcagctgctttgtcagcaaattcttttttaaattcttctaaagaaccccattgttctttaattttttctactacagtacctttttcttctgagtttggtgaaagtaactcccagaataatgaatggtttaaatgtccaccgccattattacgtacagcagtttggatgttagctggtacactgtctaaattagcaacaatttcttcaatagatttagattctaaatctgtaccttctactgcagcatttaatttcgtaacataagtgttatgatgtctgtcatgatgaatttccatagtttctttgtcaaaatgtggttctaatgcatcaaatgcgtatggtaattttggtaattcaaaagccataaataatcatcctcctaaaatgtctgtaagtaaataataacaagcagtgactggttcaacaaagaatttgcttaaattctactacttattattttctctactcatttaatataactcaaatcaaaaataattaaacattttgtatataaaaagttaacagatttgccataaaatcatacgaacggagtatgaaatgaacctttatcttctataatttaaaaaatgagatttatgcatacatctgaccaaatgtgcataaatctcatttctttatattaatcttggcaagactcacatacaccataaacttcaagtttgtgtttgtgaatattaacaccaggtagtgataactttatctgatctattggacaataatctattacctttgtatctccacacttttcacagataaaatgatgatgatgatggtttgtacaagcgattctaaacttcatttcaccatcaagttctgtattttcaataatccctaaatctttaaataagtgcaggtttctatatattgtgtcgaatgaaattccaggataattttcatccataacttgctgtatatactttgcgtttatatacttatcttcttcgacaaaaatatctaacatatctttacgtttatctgtatattttaaaccgttctcttttaaaattttaatagcatcatttgtattcattgatattagctccctttttaaacttcattcgcattttctgataagccattgtaatcataagtaaaataacaagtagaactacaattacaccacccggagaaatgtccatatagaaagctaggactaagcctaatattactgataattcacctaaaaatacacttagtaatatcaattgcttaaaactttttgttattcgcatacttattgcaattggtaacgtgattaacgcacttactaacagtatccctacaacacgcattgaggcagaaataaccatcgctacaataacaataaataaaaattgaatccatttaggaatgccaatgactttactatattcctcatcaaatgacaatataaataattctttataaaacaatgtaataaacagaacaactatgatggcaatgacaataatcgttgttaaatcacttatattcactgcgcttattgagccaaatagcaatccaacaatttcttgattgaacccatcagctaatgaaatgaagattgcactcaaggcgataccagcactcattataattggaatagcaatttcttggtaagcagtgtatgacgttcttaatttttcaattagaagcgcacctactattgcgaataagattccaaaccacattggattaataaatactagtgttggcataatagtaagtaaaaacataccgaaagatataccacctaaagttacatgacttagagcatcagctataagtgatagtcgtctaacaacgataaaagcaccgattagaggcgcaataaaacctatcaagataccactaattaaagagtacctcataaaatcaaaattcaataatgcatctatcaattgtgacacgcctttccattttaaataaactcaaatctttattaattacaacattctcgattatgctgatgatcgacaaaacgtacaggatgtccataaatttttgaaatttcaacttcatcaagtgatttaaactcatcagttgtaccatggaaatgcaaatgcttatttaaacatgctacttcagtagcagtatctgctacaacaccgatatcatgagtaactaagataatggtgataccttcttgttttaattgatctaaagtattataaaattcacttacatgttttgcatcaataccattcgttggttcatcaagtactaatactgcaggttctgaaatcaatgctcgagcaatcattacacgttgttgttgaccacctgataattctgctatatttttatgaattaaatcacttatattcagtctttctagtactttaatcactttttcattatctttgctattaaatgtttggaaaagacgttttgtctttgttaatccgcttaaaacaacttctttaacacttgctgggaaacctgaattaaaggcatttgctttttgtgatacatagcttaatttaattgatgttttcttatttttaaaatcaataccttcaacaaaaatctcaccactttgtaaaggtaataaccctagaatcaacttcaataatgttgatttaccagcaccatttggtccaacaattgctaaaaattcacctttatttattttaatgtttatattttctaacacttttttatgatcatagtagtaattgacatttttcaattcaaagactggtgtcatcgtattctcacctcgcattcaactatacaactcctagtaacatatgtaaacagtaatgtttacgactcaaaattagacaaaataaagagatatgcccccttcaagttttatttatcgcatttcttgaagagagcattatcattttattgttgcataaccttattttttaattctgggtcaaattgctgttgttttaacatttcaatttcaagtttatatggcggttttttatttttcttatcttcaccaacataaggtgtttctaagattttcggaatatctttaaaactatcatgatgcacaatgtaatttaatgcatcaaaaccaatgtaaccgaagccaatattttcatgtcggtctttttgagcgccacggtcatttttagaatcattgacatgaacaactttgattctgtcgactccaataattttatcaaattcatttaatacgccatcaaagtcctctttcacattatatccagcatcatgcgtatgacatgtatcaaaacatactgataaacgttcgttattatgaactccatcaataatacgtgctaactcttcaaacgagcgaccaatctctgtacctttacctgccatcgtttcaagcgcaatacgtacattattgtcattcgttaaaacttcatttaatccttcaataatcttattaattccggcatcaacaccagctccaacatgcgcacctggatgtaatacaatatctttagcgcctatagcttgcgttctttcaatttcttgttgcaagaaatctacaccaagattaaacgtttctggtttggttgtatttgcaatattaatgatgtatggtgcatgaacaacaatattagataagccatatttttccatcacttcatgacctttagttatatttaaatcttcaatacttttacggcgcgtgttttgaggtgcaccagtataaatcataaatgttgtttcaccatattcatacgcttctatagcagaaccttctaacatctttttaccactcattgaaacatgtgatcctaataacataaaacacacctaaccttttttgttttgcttacgtttttgtctattttgctgcttactaaattgtttacgctcttgacgtttcattttttcaacttcttgtttaaatttcttcttataacctggtttaactttgtttttaattttacttcgaactttgttcttcacttgattagttaaatggtcatctttgcgcattcttgcttgacgctgattgtgcgctttaacttcttttaactcaccatctttaatatcaacagtattgaatacaaaaccgcgatcttctattaatgaaatattgtgttcttcatcaggactataaagcgtaattgctacacctttataattcccacgaccagttcgtccaactctatgcgtaaagaagtcaatatcatttggcacatcaaaattgatgacatgactaacaccttcaatatcaataccacgagatgctaaatcgctggcaataacgtattggaattctaaattacgtatacgtttcatttgttgtttacgttcacgtggcgttaaaccaccatgaatcataccaactttaataccagcttcatttagtgaacgtgctaaatcatttgcattatctctactattacagaaaataatacataagtatggatttagtatatcaattaaatttaaagttttttcaactttagctgcacctttagtaggtattaaaaagaattcgatgttctttttattttgttttttactgtcgacagctacatattctggatgacttaaatatttatttaaaaatggttgtaactgttgtggaattgtagcactaaacaccgcaatatttgcattatcttccaatcttgcagcaatgtaatctacatcttcaattaatcctaagtcaatcataagatccgcttcatcaataactaaatatgatgctaagtgcacatgtaaatgtcccgttttagctaagtcattaattctagtaggggtgcctataatcaattgtggttgtgcattacaacgttgtctatctttctctatatctgtaccaccaataaaaactttaactgaaacaccagctttaaattggcttaaatggttcgctgcatcgtatagttgttgtgcaagttctcttgttggtgcaactacgattgcttgtggttcttttatttcactatcaattaactgcattaatggtaataaaaatgcatgagatttccctgtacccgtttgagattgaccaattaaatttgttctctttagtattcttggaataattcgattctgaatttcagttggtttttcaaaattaaggtctttcacagcgtcaattaaactagattctagattaaattgttcgaatggatgttttgccatgatttggcctccttatatgttcatctttactattataaagtataaatgtgctattttaaataaaaatattaaaacctcgaaatttcaaaatttagaaatcccgagattttagtttaaatatattgaaatggatctgtattaattgtagatgcttcaacatctatatttattttttctgtattgaaccgattcattagtaacgtttttaaaccttctttcatcacatattcgctgtaatgattaatatcaattaaattcacaccatgaattttagcatctaaggcatcatgatgtttaatatcacctgtaacaaagacatctgcgccttgttggacagcttgatattcatatccaatacctgaaccaccaataattgcaatacgtttaattttctgattagactcaccaacaaaacggacacttgggatatttaatttagatttaatatcagctgcgaaatcttccaatgtcatttgattatccacttctgccataacgccaagtccataaagggatgtttgttttatctcaataaaatcaaataccggtgtttcatatggatggtattgtttaattaattgctcagcccttgacttttgatatgcatctatcataaattcaattttaacttcatctacatattcaattttatcaatttgtcctattgttggattagcttcaccaactggtttgaattgccctcttccttcactttcaaagaaacaatattcataattaccttcttgcgctaatccattttcactaagcttatctttaaatggtccaacattatccttaggtatatatgtttgaactttatagtatacatcttgttgattatttattattgaaatgttcttcaaacccatcgccttcgccaacatcatattgacaccatacggatttacatctaaatttgtatgcatcgctattaaattaatgtcatgttgaattagttttctaatgatcaaaccataaccattagcttttaatgatgttacgcctttaaagattagaggatgatgactaataatagtattataacctttttcgattgcttcatttactacttccaacgtacagtctaatgctgttaaaacaccagtaacttcaacatcttcatcacctattaacaatcctacattatcccaagattcagcagtactaaatggcacatgatgatctaacaatgtcattaaatcagctattttcattactataacaccctttcaattacagcaatttcgtcattaatttgagctaaacgttgatgatgttgttcagtattgagtttcgatttaatatgataaagtgcttctaactctctttgccatttttttataaaatattcatttttgttgttcagcaattttggtccgaatttcaatccatcagatgatagctctattaattgtgtagaatattctgctacaacaatttcataaatatggcctttttcttccattattatttcatcaattatttcataattcaattgttgtaatgtttgtcttaaattttcagtttggatattactttgtaaaatcaaccttggatgttgacttaacttatcttgcccatcttttaaaattttagcaataagtggtccgcccataccacatattgtgatattatcgattacgtcctcaggttgaataacacttaagccatcccctaaacgtacatcaattctatctactaattggtttgcagctacattttttacagcagcttgaaaagggccttgaataacttctccagcaataccgcattcgcataaatggttttgaattgcatagattggcaaataagcatgatctgagccaatatccgcgattgtaccttgttttaaaaatcgacttaccgtcgttaatcggttatttaacgaaatcattttattctcctttatgaaaaaagaggttgaacattattcaatgtaccaacctcactcaagttaaatcttaatctaaaaataaataagcgcttattcatgtcttggtatcaatcattaaaattgatataaattaatccataaagtctttcaaacgtttactacgacttggatgtcttaattttctaagtgcttttgcttcaatttgtcgaatacgttcacgtgtaacaccgaaaactttaccaacttcttcaagtgttcttgttctgccgtcatcaagaccaaatcttaatcgtaatacattttcttctctatcagttaatgtatcaagcacatcttctaattgctcttttaataattcataagcagcatgatctgaaggactttgtgcttcctgatcctcaataaagtctcctaaatgactatcatcttcttcaccaattggcgtttctaatgaaacaggttcttgcgcaatttttaaaatttcacgaactttttctgctggtaaatccatttcttcaccaatttcttctggtgctggatctcgacctaagtcctgtaataattgacgttgaacacgaattaatttattaattgtttctaccatatgcacagggatacgaatcgtacgtgcttggtcagcaattgcacgagtgattgcttgtctaatccaccatgttgcatatgttgaaaacttaaatcctttgttaaagtcaaatttttcaacagctttaataagacccatattaccttcttggattaaatcaaggaataacataccacgacctacgtatcttttagcaatacttacaactaaacgtaagttcgcttctgctagtcttgattttgctacttcatcaccttgttcaatacgtttggctaattcgatttcttcttgtgcacttaataagttaacacgcccaatttctttaaggtacatacgaactgggtcatttattttaacacctggaggggcactaagatcacttggattcagtttctcgtcagtatctgaactatctttttcattaactagtgaaatatcattatcatttaattgatcaaagaaatcatccatttgatcagagtcgatatcaaaattctgaagtttttcagcaatttcttcatgacttaaatgaccctcttttttacccttttcaattaattgcttcttaacatcttctaatgttaatgtcggatcaattgtttgttttttaattttaactgtgttatcagacatgaaacggcctcccgattttaaatatgaacattcgaaatttattcaatattgctattttaaactaaattcttaattaattcatccatatttttaattttattttacaaattggaactaatcccaatatttatttttcaatagtgttgtttaaatgcggtaactatcatttacccttatacattttgacataatcattattcgtattattctttaaaatcacatgctacatgcgttctttattcttagcaacaatttgctgtaaatagtatttttgtaattctacatcgccaatccttgtagcttcccttaatttatgattcaatgactcaattgtttcttgtcctttttcattaataacattgacataatcatcaatttcattttcatatggttcgtcattcaaattatattgttctaagctaattagtgtttctctcaactcatttgaattaacatactgcacagcatcactgatattatattgatcattttccgcataaaaatcatgtaagacttcgaatacatatttaaaatgctgatttgtgaagttatccttatcaacactttcataataatttaaaaatgtatctttatctctcattaaatgttttaaaaatgctcgctccgctttttcttgacggctcaaattgtcaaattgtgccataccaattggctcaggttcaatataaccgccatactcatcataaccgccatactcatcatctggataataattggctggtgcttgattgaattgtatttcgttagctaattgctcaggactaacattgaaaaatggtgcaacatcatttaaagccttttgttgcaaaatcgatgatttcataagcgaaatatcatgacttagttctttcaaataacgttcatatgaaaggtcattatgtgcaatttcatcttttaatatactcactttataatgtgcaaatgactttttgtcattttttacaaaagcagtaaatgcgtcgttgccatacttaccaatgtattcatccggatccatgcctgatggcaattgtataacaaatacatttagcccttgctgtaataaatgttgacctgttttaagtgttgcttcactacccgcaaaatccccatcaaacattaatgttatatttaatgttaactttcgtataaaagtaatatgttcatctgacaactgtgtccccattgttgcaacaacgtttttcaagccagcagtatcagattttataacatccataaaaccttctagtaatacgatttcatctaattttctaattgatttacgcgctttatctaagttgtataacaactttcttttttgaaagataggtgtttcaggactatttaggtattttggttcttgaccggtatatgttcgacctgaatatccaacaattcttccttgcgcatttttcaaaggaaacataatacgatttcgaaatctatcgtaataactgaaattttcttcgttacgtgataataatccggcttcatatgctaattcaatatcgtaaccccttttttgaagaaaatcatgacaaaaatgtgagctatcgggtgcaaagccaatgcctcgctctttaataagcgcatctgtaaaaccacgttcttgtaagtatgttaatgcttgttcgccttcgactgtctttgttaaagcgtaataataaaattcttgtattaactcatgcatttcaatcatttgtaaatcatcagaagcaatttgaatatttgagttaaattgtgttgcctcaatatctacagcaacattaactctatcacctaattctttaaccgcttcaacaaatgatatgtctttaatttcttgagtaaattgaaaaacattgccaccttttttacaaccaaaacaatgacagatttgtttatcttcagaaactgtaaatgaaggtgtcttttcatcatgaaaaggacacaaacctatataattgcgtcctctcttttctagttttacatattcacttaccaagtctaaaatgtcggttttatcttttatttcattaatgatcgattgatctattcgcaaattaaatcacctattaagcattagttatactattatacctaatttttgacaaaaatgaaatcatttcgatttattttgttcaatataatggattatatcgtttgctgtttcttcgattgctttttgagaaacatcaatgacaggacatccaatttcacttacgatttcttcaaagtaattcaattcttcttggattcgagcttctgttgcataacgagctgtgtcacctagtcccaattgttttaatcgctcttttctaatgcgatttaatttttcttcacttattttaagtgcgatacatttctttggatcaatatcatataagccatctggcggtgtcacttctggtacaatcggtacattcataactttgtaacttttatgcgctaaatactgggataatggtgtctttgaagttctcgaaataccaagtaaaacaatatcagctttaggtaatcctttaggatctttaccatcatcgtatttaactgcaaactctatcgcatcaattttcttgaaatatgcatcatctaatctatgaacgatacctggctcattataaggtttttcttcaaccgaagctgataataaatccattaatggccccatgatatcgacagacttcaattggaattctgctactttctcactcatatattgcttcatttcaggtttaataagtgtataaacaatgatagcatttgtatcttttgcaacttgaatcacttcatcaacatcttcaaaagattcaatatatggatatcttaataattcatttttacattgcttaggattgaattgtgaaatacctgccctagcaactaactctgccgtttcacctatagaatctgaagctacgataattttaattttttccattacttctcacctattctttatataatgctactaataacttagctattgttgttttggaaattcttccaattacttcatacttttgattatctttttttcttacaattggaatcgaatcaatttctttttcaatcattctatctgctgcgtatatgactaattcgctttcctctaaataagtgacattaggcatacgtgtcatatttacactgataggtactgtatgaatatctgctccaatcattgaagctcttaataaatcttttcttgaacacacaccaacaaaatcgttatcttcattaataataaataatgtacttacatcttctaaaaaaattgtacaaatagcgtcataaactgttgtattctctcttagcacaacaggttgagacatatagtccttaacctcaaattgtcgaagtttttcattaaaaaacttaccttttgatttacctgaataataatatccaactcggggacgcgcttctaaaaaacctgacattgttaatatcgctaaatctggtctaagcgttgctcttgttaaattcaacttatctgctatttgttcaccagtaatgggtcctttagttttaacaatttcgatgattcgttcttgtctttgactgagttctataggtcttcaccccttttttattcacttattattataccgatatttctttcatgtcacaaacacattaattttacttgcctttaaataatctatcaattagaataaacgtacagcgagttaaggatagtgtaagcttaacaataagattggcgcaacgaatcattttaaaataaaagcgagtgactacactaatttgggtggaaccgcgggttaaatacgtaacttattttgtattatatacaatttaaaatattaactcgtcccatggaagtaaagcatatttactatgctgttattttccatggggcgttttcatgtatgaggagaggtaattatggcaaaagatatggatacaattgtttcattagcaaaacacagaggttttgtgttccctggtagtgatatttacggtggtttatcaaacacatgggattatggtcctttaggtgttgaattaaagaataatgttaaaaaagcttggtggcaaaaattcattacacaatcaccgtttaacgttggtatcgatgctgcaatcttaatgaatccaaaagtatgggaagcttcaggacacttaaacaacttcaacgacccaatgattgataataaagatagtaaaattcgatatcgcgctgataaattaattgaagattatatgcaagatgttaaaggtgatgaaaacttcattgccgatggtttaagttttgaacaaatgaaaaaaattattgacgatgaaggtattgtttgtcctgtaagtaaaactgctaactggactgaaattcgccaattcaatttaatgtttaaaacattccaaggtgtaactgaagattctacaaatgaaattttcttacgtcctgaaacagcacaaggtatttttgtaaactataaaaacgtgcaacgttcaatgcgtaaaaaattaccatttggtatcggtcaaattggtaaatcattccgtaatgaaatcactccaggtaacttcattttcagaacaagagaatttgaacaaatggaacttgaattcttctgtaaacctggagaagaaatcgaatggcaaaattattggaaaacttttgcaagtgactggttaacaagcttaaatatgagcagtgaaaatatgcgtttacgtgatcatgatgaagatgaattatctcattactcaaatgcaacaactgatattgaatataaattcccatttggttggggtgagttatggggtatcgcaagtcgtacagacttcgacttacgtaaacatgctgaacactctggtgaagatttcagataccatgatccagaaacgaacgaaaaatatattccatattgtatcgagccatcacttggtgcagatcgtgtaacattagctttcttatgtgatgcatatgatgaagaaggcgttgaaggtagtaaagatgcacgtacagttttacacttccatcctgcattagcaccatataaagcagcgattttacctttaagtaagaaattatctggcgaagcgattaagatttttgagcaattaagttctaaattctcaatcgatttcgatgaatcacaatctatcggtaaaagataccgtcgtcaagatgaaatcggtacaccttattgtgtaacattcgactttgattcattagaagataatcaagttacagtacgtgacagagattcaatggaacaagttcgtatgccaatctcagagttagaagctttcttaactgaaaaaacaaaattctaattaaaaagactctccaccatatgtggtggctatataatttataaaaagagatactggttagtaaaattgccagtatctcttttctattcgaaaaaggtattcaaataaacacatctatgtggctacttgaataccttttattattttatgttattgttccaatctttttaattggttgattagtttctgacttttaaaaaacatacctgcatattcacgatataacattaaaatgatatctgacatttcatcaataatttcttgatggatattcaatgaattcattttatctatcggtaatttttgtaatacatctaataaatatagtgttttattcgataatataactgcatgtacatctttagaagcctcttgccttgaaatcgcaccgtcaaacttaaaactataacctattaaatctgcttgtgtgtcattaccactcacagcacagcgattaaatgatgcagtaaaaccaaatcgtttcatacactttaacataactacgactgacattaactgtgcagatgtacctgattctattttttcaagaacaaattgtaataattgatagttatatggtgcaatgtcaccttcatccattgagcgctcaatagtttcagctgccagagacgcataactgcttacgaaaaggtccatttgtaatttataatgttgactaataacatctacagaatttaacgttcccatacctcgccactgattgtaaataaacaaaccataaacaaacaattgcgtttgcgcttgtaaacccgtcttaacttttttagcacgcctagccataagtggtacttttgcaccatgctcatttaaaatcgtgataattttatcagattcaccataatcaactgctttgatgataatccctttttggcgcattaacaattatcttcaccacttttaagattaatcttggtcttcaacataaccaatttggcgaataaagttaactttgtttcgccagtctctttgaactttgacccataattctaagtaaactttagagcctagaagcatttctatatcacgtctcgcacgtttccctacttcttttaactttttaccgccttttccaatgacaattcctttttgcgaatctctttcaacatatatagttgcttcgatatgaacacgatcttcgctttctttaaccatacggtccacattaacaccaatcgcatgagggatttcttcacttgtaagatgaaggattttttcacgaatgatttcacccactacaaattgttcaggatggtctgaaatttgatcatctggataatatttaggtccttcgggtaaatacgtctttaaaacatcaataaaatgatctacatttagcccttctaatgctgaaataggtacaatctctgtaaagtccatataactttgatattcttcaatctttggcattaattcatctggatgcactaaatctattttatttaatactaaaaatactggtgtcttaacatttttcaacatttctataatatattcatcacctcgtccaatttcctcattggcattaaccataaacatgattgcatctatctcagataatgtatttttagcgactttcatcatatagtcacctaatttgtgtttaggtttatgaatacctggcgtatcaatgaatataatttgcgcgtcatctcttgtcataacaccttgaattttatttctagttgtttgagctttatcggacatgattgctattttatggccgatcactctattaacaaatgttgacttccctacatttggtctacctataattgaaacaaatcctgatttatgttctgtcatttattctaaatcctttcctgaaaatccaaatggtagtaactctgcgactgtcatcataaccatatctcctttatgatttgtcatatacacaggcatatcatcatcacataattcctttaaaacttgacgacatgcaccacaaggtgatgacggtttatctgcatctacggttacagttattgattcaaaatcacctggtctgtatccttgagaaattgccgataccaaactagctcgttcagcacatatcgataatggataagaagcattttctacattggtaccataaaaagttctaccgtctttcgtttttaaataagctcctactttaaattgactgtatggcgaatatgattcttgttgtgcttttctaacttcttgaaaataatgaggttgataactcatatatgcctccctaaaataacgctataaaatgtggtaaaaatactattaaacctataataaatgctaatattgaaactataagtacactaaaagccgctatatcttttgcgtatttagctaaatcatgatattcaacggtcactaaatcgacaacatattcaatagcagtgtttaaagcttcaacagtgagaactaatgcaatagcaatgagtataaatatccactcaatacgattaatatttagtacgagaccaaagacaatagcaacaatcattgcaaacacatgtaaaagaaatttatagtctttttgaattaagattttcagcccatcaagtgcatatttaaaccttttcataattagcctcgtgttaatccatatgcgtttaatattgtatcttgtcgaccaaacatttccttttcatccgcttcagtcatatgatcataacctaatagatgcaaaaatccatgtaatgctaaaaatcctaattctcgttcaaaagaatgtccgtaattgtttgcttgttcttgcgctacatccgtacagataattatatcccctaaaacacgtggtatatcaagaccactaaaatcaatctctggctcatcttcttctaaagcaaatgagattacatctgtaactttatctttatctctatatgttcgattaatttcttgtatttcttgtttatctacaaatgtaacagaaagctcagcatcgtcttctatatgctcttcttttttagcaaattctaataaatcttcaatttgtttataccacgcatctttaactaagcctgtgtgatcgctaaaatctatcgtaaacatttaattctctccttcataatgttcaatgatcttacttaccaatggatgtcttactacatcgctctgatctaatttcaatatacttatacctttaacgttgtgtaacctactgaccgcttccttaagtccacttttaacacctttaggtaaatcgatttgagtttggtcaccagtaactaccatttttgagccaaaacctagtcttgttaaaaacattttcatttgcgcatgtgtcatattctgcgcctcatcaagaattacaaatgcatcttctaatgttcgtccgcgcatatatgcaagtggcgctatttcgataatgcctctttcaataaatcgctctgtttgttcacgcccaagaacagtatatagaccatcatataaaggtcttaaatatggatctaccttttctttcaaatctcctggtaaaaatccaagtgactctcctgcttcaacagcaggtcttgttaatacaatacgtttaacagcacctttacggagttgctttgctgcataaactacagctaagaatgtcttacctgtaccagcaggacctataccaaatactaaatcattatttttcatggcattaacatatatacgttgccccatcgttttcgcacgaatcgtcttaccaaatgcatctttagttatctcttcatcatataaatctaacagatgttgaattgtgttattatgcgccattttaatagctgcttcaacatctttaattgtaatattattacctaaatcaataaccttcagcaaattgattaatactgattccgctttttctacgttttctatttttgtacctttaacggcaacttcttgtcctcttgcatggatgacaacatcgaaactctcttcaattgcttttaaatgttcatcattatttccaattaaagcttgagattgattcatatcgtctatttgtataattccaggcatacacgcgctccttttcatatatcatttatattcattctatgatgctttaatatctacttaattatatcatgcaattgattgatttaaacatctttgcattgacttactcatttttctttaatttaaaataatcatttatacttttcaccttgtcataaaagcagattcaattttagactaatcaattttttgttgtaatttaaataactaatatttctcgaaagattctctttgtttttcaatttttcttaacgtaaaaaaacaagcaactaccattacgatagtgcttgttttcaaaaaattttataattgttttggtttagctaaaatttctgaccatatcataccattgattacttcatctttatcaaattggaacgctgatttagtcaaatctttttcgacattttgagaattaagcaactgctttaatttcaaacgttttgtacgttcagataagtatttatcctcaataatatctctagcacgtttttccattttagcaatttgcttttctttttctctatcaatgtcagtacgaatcgttttaatatcatctctaagtgatttttctaattgacgtctaatttcgtcagaattatcttgtctagaaggtctatgtttctgctccaccggttctgctttaggcactgtaattggtttctctgtcatcggttttgtttctggttgttttttaggtgccataggttctacaacaggtttcgatttaggctcttcctttggaagttcatcgaataaaggtggtaacgtatcatcatattttcgtttcgatgatttcttttcttcttcatttaattcttcacttatttctttaaacgttcgctcaatttcttcaaaaaagccacctttttttggttcattatcggtagatgttttttgaggtggcttttgattttgtctatctttatgactattttcgcgcatagtagtaatgatagaaatgatcactgatatgacaaaaattagaataccgacactcatttaatcacctctcgacttaatgttcaggtgactcatcatcactttgatcagttcgtttattaattgcatttctcatgcctgtatcagcttcgatatttttcaaattataataatctttaacactgatattacctgaacgtaatgcttcagccatagctaatggtacttcagattcggcttcaactactttagcatgcatttcttgtacacgcgctttcatttcttgctcagttgctacagccatagctctacgttcttcagcttttgcttgtgcaatatttttgtctgctaatgcttgttcagtttgtaagtctgcaccaatatttttactaatatcaacgtcagcaatatcaattgataaaatttcaaatgcagtacctgaatctaaacctttgcttaaaactgttttagaaatattatctgggttttcaagtacttctgtatgatgcttactagaaccaattgttgaaacgataccttcaccaacacgtgcgatgattgtttcttcaccagcaccaccaacaagtcgagcaatattagctctaactgtgatacgagctttggctttcacttcaataccgttcattgctacacctgcgataaatggtgtttcaatgactttaggattaacagacatttgaaccgcttctaatacgtcacgtcctgcaaggtcaattgcagcagcacgttcgaaaggaagatcaatgtcagcacgttgtgcagcaatattagcgtcaacaactctgtcaacatttcctcctgctagataatgcgattctaattggtttgttgttaatgctagtcctgctttatgcgctttaattaatggcgctataacttttcttggagatacacgacgtaaacgcataccaaccaatgtacctataccaacatgaacgccagctgctaacgctgaaatccataaaccaatgggtacaaatgagaataaaataagtaatgcaactactataataactgctattacgataaaacttaaactaaacatggtatcgctccttttaattaatctacttccctcacaactactcttgttccttcaacttcaaggatttttaccgttttattgcgtaaaataaagttgccatctgaaacagcatcaatacgttcattttcacaaaaaataatccctgcaggtcgaagatctgtaactgtttgagcagtctttcctacgaggtgcgagcggttatcatgagaattgtaacctgactcagaattagttgaatcttttaagataactttatccaaaaacggaatctttctgttgaaaatcttcactaatatcacccattctacaatcgttaaaatcaaggcaacgataacattcgcaagcataaatagcaaattatcaccgagcgttgttatgcttatagttatcagtatcatgccaataataccaattactgcaccaactacaaataattcaattacaactaatataacgccaattgagaatattaagatagaatgcatattgacatttccttggattagaaatcccaaaaataaaataagtaatgataatgtggcgataataccagctgcattgatttttttagagtaaagttgatatacaaatcctaagaatgtcaaacaggttaatattaacgtaaaaataggttgaacaattatattactaacttgttcaacccaagtatctccagccgttgattccaagatagttgtcatttgtaaaaaattattataactcacaatttcacctcgccctcacattaattatacatgaaattgaatatactttatagttataagaacctatagaatatcaatttgattatttataaactatataactttttttaattaaaaattgacaacaaaaaaacatcacatattagtgtaagacactaacttgtgatgtttgttttatataattaatattcgtgttgagggagtcaacagaggtattaattatttgaatttacgtttacgtgcagcttctgatttctttttacgttttacgcttggtttttcgtaaaattcacgtttacgtacttcttggattgttccacttttagaaactgaacgtttaaatctacgtaacgcatcttcaagtgattcatttttacgtactactgttttagacatctgtatttccctccctccaaatatcaacggaactttatagtcaattgcacagtaaaactatgcatttataagtataatatatctgtaatttatggtcaattagtaaattgttttttatttgaaacatatttcacatcaaaatcacaaagacttttagattttgttctaaaaatctcttaataatttatttaatgagaagagttgcttatatagtaaattgtgaagccgttaaaacaacgttacaaaacctatatctttaatacggaaccttatggtatgaatcaaggaatacttaaactaaaacttctctatcagatttatttgttgcgaaatcaacaactttaattgcttgcccttcatttaatggataatttgcttgcgtaattttaacttttacaatttgacctatgagtgattcgtcaccttcaaattgtactttcatataattatctgcatatccaactaatgtgccttctgtgtcaccctgttcctcaggaattacttcaagcacatcttgatcaaatttagacgcatataactttccgagttgattgcttagcgtaattaacttatgcacccgttcatttttaatttcttcatcaatttggtcatccattcttgcagctggcgtgccaattctaggagaataagggaaaacatgcagttcagagaacttatgctttacgataaaatcatatgtttcttggaactctgcttcagtttcacctgggaaaccaacaattacatcactcgtaactgccaagtctggtaaagctttatgcaattttgttaatcgttctgaaaatctatccattgtatacttacgtctcatacgttttaatactgtatctgaaccagattgtaatggaatatgcaaatgacgcacaacttttgttgaacgttctaaaacgtcaattacttcatctgtaagttgacttgcttcaattgaagaaattcgaattcgttctaatccattaatcgtttcaagatcacgtaataattgggccaagttataatcttttaaatcttgaccatatccacctgtatgaattcccgtcaatacaatttccttatatcctgaattcactagttgcgtcgcttgttcaactactttttccggatctcttgaacgcattaagccacgagcccatggaataatacagaatgtgcagaagttgttacaaccttcttgaatttttaatgacgcacgtgttctatctgtaaaatatgggacatctaattcttcatatttacgatttttcatgatatttccaacaccattaattggttggcgttctttacggaattcatcaatgtaacctaatagtttatgtctatcttgtgtaccaactactacatcgacaccaggaatttccataatttcagctgatgaagtttgcgcataacaacctgttacacagattacagcatcaggattttgtcttattgcacgtctaattatttgacgactttttttatcacctgtattcgttactgtacaagtattaataacaaatacatcagcattcgcttcaaagtcaacgcgctcatagtttgcttctttaaataattgccagattgcttcagtttcataatggtttactttacaacctaatgtgtgaaacgcaactgttgacataaatattcaccccattaattctttttcataacttattgcacttaacgcatacaatggcgcagtttctgcccgtaaaattctcggtccaagaccaacaactgtactagtattactaaataatgaaatttcattttctgacaaaccaccctcaggaccaaaaatcatcaacactttatcctgagccttgaattgttgtaaagtttgcttgaaattgcttaactcaccatcttttgcttcctcttcatatgcaataagaatatagtcataattatcaatagtatcacaaattaattttaaattcgactcgaattgaatagatggaatcactaaacgatagctttgttcagcagcttctttaattattttttgccaacgctctatctttttggcaacttttgcctcgtttaatttaacaattgaacgttccatgctcacagctataaatgatgaagcacccaattcagtagctttttgtagcaaccactcatatttgtcagctttgattagtccactgcaaatcgtaacatcaactggcaattctgtattaatattttgtttttcttttaaatcaactgcaattttatcacttgttatatcagcaatttcacataaataaactgtttgatcattaaaagttaaaataattttactaccaacatcatatctcattacatttgttatatgatgaatatcttctttttttgtaataaaaaaacgctgacttacatcagcgttttggtctatgaaataacgttgcacattattcactcactttctggccaacaagacaaacccaaccgttgtcatgttgttctgaaataattttaaaacctacacgctccatatgtgactgtataccttcatacttctcttttataataccagaagtaataaaataaccgccttcatttagagtattataagcatcttcaatcatttcatcaataatatgcgctaaaatatttgctattacaatatcaaatttttctgtttcgtctttcaataagttacctggaacagcttcaattaacgtttcacaatgatttcttctgaagttttctttagctacactcactgccatttcatcaatatccaacgctttaatacgttttacaccgattagatgacttgcaatacttaatatacctgagccagtaccaacatcaattactgaatgctgtggcaatacatatgtttctattgccttcaaacacatacttgtagtcggatgatcacctgttccaaaagccatacctgggtcgagctcaatgcaaagctcttcatccgcttctttagcatatgtttcccaactaggaactattgtgaacttcttcgacgctcggaatggatggaaatagtttttccattcattttcccaatccgtctctgcaataatttgctcactgaattgaacgttatgttgatcaagttcatctaaatttaataactcatctttaatttgctgtcgcaacttatcatcataagtcatttcattaaaataggctttcaatcttactcccttatctggataatcctcttttttcaaagcgtaaatttcaccgtatttatcttctggttggttaattaaatcatctgaatcttctatcacgacaccatttgatccatgattttcaagtatattggtagccaattctactgcttcatgattaataataattgaaagctctgtccagttcatactttattctcccttaaagaatctttttgctctatctttaaaattcgaaggttgttcattaatttcttcaccatttaattgggcaaattctttcattagttctttttgtctatctgttaatttagtaggcgttactactttaatatcaacatataaatctccgtatccatagccatgaacattttttatacccttttcttttaagcggaattgcttacctgtttgtgtaccagcagggattgttaacataacttcattatttaatgttggtatttttatttcatcgcctaaagctgcttgtgggaagctaacatttaatttgtaataaatatcatcaccatcacgtttaaatgtttcagatggtttaactctaaatactacgtataaatcaccagcaggtcctccattcacgcctggagagccttcaccagctaatctaatttgttgttcattgtcgacaccttcaggtactttcacttctaatttaactgttttattttcagtaccttttccgtgacatgttggacaagcttcttcaaattcttgaccacttccattacatttaggacaaacttgttcagtacgaactctacctaaaattgtgttttgttctacagctacatgaccagcgccattacagtaactacaagtctttttacttgttccaggctttgcaccatcaccatgacatgtttcgcatgttacatctttacggattgaaatttcttttgttgtaccaaataccgcttcttcaaatgttaatgtcattgtatactgaagatcatcacctttttgcggtgcatttggatctctttgtctgccgccaccgaagaaagagctaaagatatcttcaaaaccgccgccaccgaagccactaaaaccgccaaagtcagagccattgaatccttgtccaccaaaaccttgtggaccatcatgtccaaattgatcatagcttgcgcgtttattatcatcacttaaaacttcataggcttcagaaatttctttaaacttttcatctgcaccttcttctttgttaatatctggatgatattttttcgaaagctttcgatacgcttttttgatttcatcttttgaagcatctttactaatgcctaaaacttcataatagtctcttttggccacagctatctctccttttcttaattaactcatatagtttaacgtaatatgtcatactatccaaataaaaagccaaagccaatgttctattgactttgacttttcagatcatgacaacattctaattgtattgtttaattattttttgtcgtcgtcttttacttctttaaattcagcatcttctacagtactatcgttgttttgaccagcatttgcaccttgtgcttgttgttgctgttgagccgcttgctcatatacttttgctgataattcttgaatcactttttcaagttcttcttttttagatttaatatcttctatatcttgaccttctaaagcagttttaagagcgtcttttttctcttcagcagattttttatcttcttcaccgatattttcgcctaaatcagttaaagttttttcaacttggaatactagactgtcagcttcgtttcttaagtctacttcttcacgacgttttttatctgcttcagcgttaacttcagcatcttttaccatacggtcgatttcttcgtctgataatgaagaacttgattgaattgtaattctttgttctttatttgtacctaagtcttttgcagttacatttacaataccgtttttatcgatatcaaacgttacttcaatttgaggtttaccacgttcagctggtggaatatcagtcaattggaatctaccaagtgttttattatccgcagccattggacgttcaccttgtaatacgtgtacatctactgatggttgattatctactgctgttgaatagatttgagatttagatgtaggaatcgtagtgttacgttcaattaacgtattcatacgtccacctaaaatttcaatacctaaagatagtggtgttacgtctaataatactacgtctttaacgtcacctgtgataacgccaccttggattgcagctcccattgccactacttcgtccgggtttactcctttgttaggttctttaccgatttcttttttgacagcttcttgtactgctggaatacgagttgatccaccaactaagataacttcatcgatatctgagtttgttaagccagcgtctttcattgcttggcgtgtaggttccattgttcttctaattaatgaatctgataattcttcaaatttagaacgagttaagtttacttctaagtgtaatggaccgttttcaccagctgagataaatggtaatgagatttgagtttgtgatacacctgataagtcttttttagctttttcagcagcatctttcaaacgttgtaatgccattttatcttgagataagtctacgccattttcttttttgaattctgcaactaggtagtcaataattacttggtcaaaatcatcaccgccaagtttgttgtcaccggctgttgatagtacttcgaatacaccgtcacctaattctaggatagatacgtcaaatgtaccgccacctaagtcaaaaacaagaactttttcatctttatcagttttatctaaaccatatgctaatgctgcagctgttggttcattaatgatacgctcaacttctaaaccagcaattttaccagcatctttagttgcttgacgttcagcatcgttaaagtatgcaggtactgtaattacagctttgtcaactttctcacctaaatagctttcagctgtattttttaagttttgtaaaatcatagctgagatttcttgtggtgtgtatgatttaccttcaatatctactttataatcagtacccatatgacgtttaatagattgaacagtgtttgggtttgtaatagcttgacgtttagctacttcaccaacttgagtttctccatttttgaaagctacaacagatggtgttgtacgtgaaccttcagggttttgaattacttttggctcatcgccttctaatactgttacacatgaatttgttgtacctaagtctataccaataattttactcataataaaattcctccatttaatcattaaattaatttaattttaaacaatgtcttttcgccaaatttaagttattggtttactttgaccattgatggtcttaatactctatctttaagcttgtatcctttttgtagttcttgagtgatttcgccagattcaaaatcagggttatcatcttgaactacagcttggtgaatatttggatcaaatgcttcaccttcagttttaataacttcaagaccattatcttttagtgcgttaatcaaactttcatgcaccatttgtacacctttttgaagagatttaaaagtctcatcatcaccttcaatttgaagtgcacgttctatattgtctattgctggtaaaatatctgttaacacacgttgtgcttgatatgttttatttatttcattttctttttgaattctacgcttataattttcaaactcagcgtagagccttaaatatttctcttcgttttcatctgctaattgttgaagttcattaattttttgatcttttggatctatttcttcaataacattctcgtcagacgtttcttctattgcttcatcttgtaaatgacctttactttcttcagcttgttcaactgaatcatcaatattttgtttgacgtttgtttcttcaactgttgattcagtgtttttttcaactgattcgtctttatttgtcattttctgtcctccaatactttctaatccatcattaccaaattctatttaataattgaatgacattttgataatgcatagctgtaggtccaatcacagcgatttgaccttttaacgtttcatcaaaatgatattgacttgttacaattgaaatatcacttaagctgtcatcaatttcattaccaatttttacattaatatttggtgaagatatatcttgtaataattctgcaattctatttgattctatatattgtagaatgggctgaattgaagatacattactttcattcaatgcatcaataagtttaacctttccacccatataaatgctattactttgattagaaatatgattattcatcgtatttaacaatttattgataaatatttcttcctgctctgattgaacaaaagagacaatatcatcttgtaaattctgattaaactcagttagtttgtttgtaacaaaatttgatattgtatttagtttgtcattattaaacggtatgtctgaagcaagatgtacatgctcaacatgacctgatgaaaatacgataaccattataactaaattaggattagcacgaatcaagtgtacattattgataatatcttgtttatgattaggatgaacaactaaagttgtatattgagatatatttgataattcatctgcaaaatatgtcaatgctgatgatacatcatattgattctcaactaacaattgatttaatcgtcttaatttatttgttttttgatgagatgtttgttcaagtaaacgattgacataatacctaaaacctaattgtgatggcgaacgccctgaagaactatgtgtcttttcgatatagtttaaatcttcaagctgtttcatctcatttctaattgtagcaggactaacattcaagttatgtcgctcaattagtgttttagaaccaacgggttgtccaaaatcaacataatcctcaacaattgcgtttaatatactcaattgcctatctgtaatcatgttttcacctcattagcactcacttatctcaagtgctaattataatttatcaaattggtcaaagtaagtcaatgttaaagactcgaaatttcaattttttttaatcatttattaggaaagcttcaaaaacctcattacctatgactttccctcgctttgttagtgcaatcgcatcgttcttttctacaattaattccttctcttttaaattatttattgtttgaccaaagacactttcaatagattggtcaaacttctttttgaacctactactactcacaccttcatttaaacgcaaaccaagaaacatttcttcttccattctctcagtcaaagaaggtttatttgatactaaaattgctttactttctttatttatagctttgatataatgattcactggattgatattcgtataacgcacaccatctacataaccacttgcacctgctccaaatccataatattcctcattaaaccagtaaaccttattatgttctgattcatggccatctaatgcaaaattagatatttcgtattgatggaaaggagattgttctatcttagacatcagcaactgatacatgtcagcacctaaatcctcattaggaagtttaagcaacccttttctatacatattataaaattgggttttaggttcaagtattaagccgtaactcgaaatatgttgaatatccatatctaaagctagatctaaactttgttcaaaatcttcaatcgtctgtttcggtaaatgatacattaaatctaaactgattgatttaatacctgcgtttttagcatttaacaccgaagtgtaaatatcttcagtattgtgcgttctacctaaaacagacaataactccggcttgaatgtttgaacgcccattgaaattctgtttactccatatttttctaatagttggactttctctttagttaactcatcaggatttgcttcaaatgtatactcgcctgtgattgtaaacgtatcacgtattgctttaagtaatctttccaactgattaatagaaagggccgttggtgtgccgccacctacatacatggtctttaagttcctatattttgctgtagacatttctgttattagtgcatctaagtactcatctacaggttgattctgtataaaatatttattgaaatcacaatatgtacatattcttacacaaaatggaatatgtatatatgcactttgtaccgtcattttaatgccccgcttctcagactgtttatccaatcggctatatcctgttggactatctgcaattattcttacttttaactttaacgtttaatcaatggttgtctaatatatcgattcattttgatatttattcttgtttagagggagtgagatagaaataataaagaaccactaatgatttattatgtagtggctcttacacattagccagatgtaatatgtccataaaaataaaattacatgagtaaaactcatgcataagggagtgggacagaaatgatattttcgcaaaatttatttcgttgtcccaccccaacttgcattgcctgtagaatttcttttcgaaattctctatgttggggccccaccccaacttgcacattattgtaagctgacttttcgtcagcttctatgttggggccccattgttataagctcatttttaactctgtcgatggctgccaatataacattgtaaagcccaggacgttaatttatcctaggctccctctttttagttattaaactttattcattgtaaattgttaataaatttttaaaaaacttattcgtcatccattttcaatacagccaagaaagcatcctgtggaatttcaacattaccaactgctttcatcttagctttacctgctttttgtttttcaagtaatttacgtttacggcttatgtcaccgccataacatttagctaaaacgtttttacccattgatttaatatttgtacgcgctacaattttttgtcctattgcagcctgtacaggtacttcaaattgctgtcttggaattaacgttttaagtttttcaactaatgctttaccacgttcatatgcaaaatctctatgaactatgaagcttagcgcatccactttatcaccgtttaataaaatatccatcttaactaaattactttctttattttcgatgaattcataatcaaatgatgcatatcctttagtattagatttaagttgatcgaagaaatcaaatacaacttcagctaaaggtaattcataaacaatatttacacgaatatcatctaaatagtccatatttataaattgtccacgtttacgttgacataattccattactgcacctacatagtcatttggaaccatcatagttgcacgaacatatggctcaaatattttatcaattttatcacgatctggcatttgtgctgggttatcaaccgtcacttctgaaccgtcccttaaaatacattgataaattacagatggtgctgttgcaattaattcaatgccaaattctctttcaattctttcttgaattatttccatgtgtaacatacctaagaaaccagttctataaccaaaacctaatgcttgtgacgattcaggctcaaattctaatgatgcatcattcaattgtaatttttctaatgcttctcttaaatcattataatttttgttatctattgggaacagtccgcaatataccattggattcattttcttataaccttgcaatggttctgatgcaggtctactagctaatgtgatggtgtcaccaaccctagaatcatcaacatttttaatacttgcaataatataaccaacatcaccaactgttaattcatcaactggaagctgcttaggtgtattaattccaacttctgttacttcgaactctttaccagtcgccatcattcgaattttatctccggctttaacaacaccgtctacaattcttatcgatgaaattacccctctatatggatcatactcagaatcaaatattaacgcttttagtggtgcttctgggtcgccatctggagctggcacaacttcaactattttctctagtatctcttcaattccaatgttagatttagcacttgctaaaacaacatcgtcttggtctaaacctatcatatcttcaatttcttgtttcacgcgttcaggttctgcagcaggtaaatcaattttgttaataacaggcaataactctaactcattatctaatgctaaataaacatttgctaatgtttgtgcttcgataccttgagccgcatctactactaaaatcgcgccctcacaagctgccaaagaacgtgacacttcatatgtaaaatcgacgtgtccaggcgtatcgattaaatggaatgtataagtatttccatctttagcttcgtactttaaacgaactgcgtttaatttgattgtaataccacgttctctttctaaatccattgaatctagtaactgatcttgcatatctcttgtttcaactgatttggtattttctaaaattctatcagccaatgtagattttccgtggtcaatatgtgctataatcgagaaattccttatattctctcttctttttaagcgttgctcattatccattttatccttctcactttcataaaataaacccgtattatctttcgcatctttgatataataacgtttttaataggtaaatgcaaacgccataatcttggatgaactttgaaattataacaatctttatttaaatacatacttgcgatatgttaatatgttaattacgtacttataattataaaacgtattgattgtgtttccaacacaatttattaaatctgcaaaattttaagctaaccccatcaaataaatgattgcacaacggttagacttttgttaaaatatttcttgttgtaatcaaataaaattttgataagatgaactcacttttaggaggtgacagaaatggcaaatatcaaatctgcaattaaacgtgtaaaaacaactgaaaaagctgaagcacgcaacatttcacaaaagagtgcaatgcgtacagcagttaaaaacgctaaaacagctgtttcaaataacgctgataataaaaatgaattagtaagcttagcagttaagttagtagacaaagctgctcaaagtaatttaatacattcaaacaaagctgaccgtattaaatcacaattaatgactgcaaataaataatctttttaaataaaagttcaagcgcatgcttgaacttttattttttataaagatagaatgaataattccagtattaactgtttatccatatatgatgatttaagtttataatcagtttccgcacaagcatctataatattcaataattcatcaagttgataatgtcttacttgtcctaacgctaattttactctgtatggatgtacgcctattgttttagcaatttgctgtccactatatcctttttgactcaaaatcttacattgataaaataatcggtaattacttgtgattagtgcaagtaatttaataggttcttctttcatagttattaaatcttttactaaatgaattgcttgttctttctttcttttctgaatgtattcagtcagtaaaaatacattttgctctaaacttctattaataatttggttaacatcctgcttattaattgttggtctatcgcctaaaaataaaatcaacttttctatctcttgtgagacaatattaaagttaatacctgtcaactcaataaataaatctaatgcatctcttttgatatctttgaaattctcatttaatttactttgaatccatttttttatttcttcttcagacatttgctctatttttttaagccttgcatgcttttttagagttttagttaacttttttctttcatcaagtttattttgatatatctcaaagacaatcaaattttcgccatcatatttttcaataaattctattaattgatttacattatgagccatatcttttggcgctttttcacctgtaaatatatatgcatttttaaccaaaattgcttttttatctgaaaagaaaggcaatgttaatgtttcttcaacaattggtgcaatctctgtttcgtataaattatatttcacaaagttaaagtcatctctatcacttttcaaaaattgtgatataatttctgcactttgtttttcaaccaattcaggcacatctccataaatagctacaatattgtcgctcattcattacaccctttcattcgtttgacacatcaatagattatatcatgtttctgtatctataaaccacttgcatttccataagagtttgaatcaacttttaaattatcatctaagtcaattgtaacttgaccgttttgttgactattgtaaatgcgactgcgaatcctttgcaatcgtttaacaacttctatattaggaagatgatacatattgttcttcccagaagaaatcaaacttattttaggcttaatcatctctataaattctttagaactacttgtcttgctcccatgatgacctacttttaaaatatcaatctccggcaagttatatttttttagtagtaaagattcattatttttactagcatcgcccattaataaaacttttttattttgatatgtaatcatagtaataatcgaatactcatttttatctcggctatttggaataaaactatcaaaaaatagaaaactactatctccaagtttaaaactactaacttgtcttacatctataagtttaatgttgtacttatggcttaatttcgataataacatcaatgtattactactatatcccttattgtatatctctatatgtttaattttaatatgactaataatatattccacttcaccaatatggtcattgtgtggatgtgttaaaattagatactctaattcatttatccctctttcatttagcgttggtaaaatatgatatttagaaattgaataactaggttgtttagtatcatcaatcactttcccacctgtatcaatcaagacattttggttcttaccaccttcatataaaatactgtctccctgccccacatttaacattgtaattttgtgatgtgaatttgttggaaacgttattaataatgtcagaataattatagtccaaaccgtaaccaatatatatttacgtttagccaataaccaaaatatgtaataaacagaaattataaatattataaatatccaatcattaaacttggtaacagaaaaatgtgattgcttgattcttgtgaataggtctagtaaccagtcatgaaaattaaaacttaggtcaaccaagtaatttagcggcgttaatcccacaataaaatgacttgtaataaagaataaaatagatagcggaaacaatataatcgaatagtacggtacaaaaatcaaattagataaaaatcccacccattgaagttgatgaaagtttggaatggcaacgataaatgaagctaattgtgcaataaacgtaattatgaataatgattgtaactttgacaattgctgtaaaaaaggaaaaagtagcataataaaaaatgaaatgatgaatgaaaattgaaatccaatatcataaacaactagtggatttaaaataaacataattataaatgcaaatgctaatagctgaataccctttattttaatttgcttagtaataagcagtacaagagttgtcattattatagctcttacagcactaggtgcataatttgtgtattgagcaaataaagctaatacaatgattgtaattcctttaatgacaaataaaggtaaatttaatcgttttaaaggtttgtaaattaagaatacaattgcagctatatgcgagccactaactgccagcaaatgatatatacctatctctttaacacgttccttaaattgctcattaatttcttttacgtcaccagtaatcaatgccataatacgatccggaaacttaatacccgaatcataaattcgattcattataaactgtttatgtttctcaattaaattagaccggttcgattctaggcagctttgtacaactatactttgtaatttaagagttacaaacttattgtcattaactttgaattgtcctttaacaatacaattacgactttcaattttctttaaatcaaaattctttttatttgttaaaaagaaaggatatatttcattttttaaactcaacctacctttatatgtgtcactaccttgacgttgaatttggattacttgagcacgctcattaaactgagaattacgttcaatataattgatataattaaatattgcttgttgtgaataatgtaaataccatgaggagaaaatgattaaaaagagagaaataggggcataaacgattttatttttacgataagtaatatacaaaagtaaaatgaaaagaaatgtagagagcactttgctagaattccaaagcactcctacaatcattgataacgcgacatacagcaaaacattaacctttagtcagatatttagcaacatattctggtgaaaatggaatttttttaaattcaataccagattgtttgagtaatttagttgcatattcatggttatgataatcttctgcatagtagatacgctttatacctgcttgaataattgactttgtacaatttaggcatggaaaatgagtaacatagattgttgcaccttcagtagatacaccttgttttgcacattgtaataaagcattcatttctgcatgtatcgttctgatacaatgtccatcttcaattaaacatccttcatctatacaatgcacctcgccagctacagagccattataaccaccagcaataatacgattatccttaacaatcgttgcacctacagataatctttgacaagttgaacgtaatgctagcaaatgactttgtgccataaaatattcttcccatttgattctttccaagatgttcaccttccatacttaaaatttagtaacattttctattaatataagattaatcacaaaaaataaaatttgcaattaaaataatccattatatcgtgaaataagatttcagtttatcaaaagttttacttccaaaaccttttacttttttcaaatcgtcaatttcttgaaatgcaccttgttggttgcgatattcaacaattgcattagctttagcttgccctactccaggaacagacatcaattctgatacagatgcggtatttaaatttactttagtattatttgtgttcccattttttacatgcacactgtttactccaatttgtggttcaacattcttttgtcctttatgaggtatgaaaatcattttttgatctgttaatttttcagacaaattaatttgacttacatctgcatcctccaataattgtgctttatcaagtaaatcaactactctatccttagatgtcattttataaacattaggatgtttaacagcaccttttacatcgacatatacaggacccttatttttggaattatctccatctttgacctggacatcttctactttggacaaactactattttcactagtgctttgtttcagagcattatctttattttcaaaatttcttgaagtataatcatcttgtctccagaatataaaaccaattaataccataattaaaacaacagcacttataatatataacttccattgagttaaaaaatctttatagcgtaataaaaattgatacaataaaaccactcctcaactttatacacgtctgagcgagtggttttacttttattttttcgcaatgaaaaacaatctttctgcatcttcattatgttcatctatattaaaatcagtaaatgtttcaacatgtttaaaaccaacttgagctaaccaagacaaatatgtcttttcatcaaatgttctctgaaaatgagactcatcaaatcttgaatatgtttcatcttcatgtcgaatgaaaaatgtcatatcatgataaacacttaaaggtaaatctccttgcacagcatcccatgctaaaaaaatgtcccctttatcatcaatataactttgattattaaacaaagtcatcattttataaacagtatgtacatcaaaaataaatacacctgaatcagtcagatgatgataaacattgatgaatgtttcaatcactgcagtttcatcttgcaaataatttagagagtcacaaaaaatagtgatgatatcaaattgttgttgcaaatcaaaagatgtcatatctccttcaagccaatttacatttgctgatttttgagctgcaacagtcaacatatcaacacttaaatccataccagtaacattacctaaagcttctaattgaactgttaaactaccagtaccgcatccaatatctaaaatatttgattcatctttgcagtgattttttacaatttcaaaccatttttcatatggttgatcttgagtcaattgatcgtacactaggctcatttctgcatattgcgacataattaatacgcaacctgactatatgattctaatggtgcatcttgatataacttttcaatattataataatttctttcgtctttatggaaaacatgtaccacaacatcagctaagtcaattaatatccaacgcgcttcattgtatccttccatacgttttacttctatattttgttcattggctacttctttcaccgctctagcaatcgcttgaacttgtcgttcattatttccgtgcgttacaacaaaataatctgtcatatcgctgatacctttcatttctaaagaaatcgtatcttcgccttttttattgtcaattgcatccacagcaattgctaataattcttgtgaattcatttaatcatcctttattctttcgtcactatagttataataatttaaacagtcaatcgtcttattatataccgtaatatctttctgtattaaaaatagtactgtgcgtttagaaatttcataaattgtcttatctaaactaccttgattgtatgccatatctcgaatatcatcaactcctgggattgttcttccaggttcgatgtaatctgcaataaaaatcagtttttcagtttttgtcatttgttgacgtccagtagtatggtatttgatagccattaatacttcctcatcattgataccatattcatgttccatgattgctgcacacacagggccatgcaatatttcactaccataactcagtagatcattacctaattcgtattgtcgaacaatttgatacattttacctaaatcatcatatttacagaaatcatgtaatacacctgctaattctactttactagtgtctccatcataaatttctgccaatttaatagctgtttctgcaactcttaaagaatgattataacgtttctctggcagtttctcttttgcaagccgttttgctttttcaatgttcatataatccttcccccttaatatagttttcaacggatttaggaacaagaacttggatagatttcccttcactaactctttgtcgaatcattgtcgaacttatatctaccctaggtatctgaattgcaatcatagcattttcaacattttgactatttttgtctcgatttacaactacaaaagtaaccatttcttttaagtattcaatttgataccatttctctagttggttatactgatccgtcccaataacaaagtacaactcactgtctttgtgttgctccttgaatgccttgatcgtgtcataggtataactctgaccaccacgtttaatttcatcgtcgcaaatatctccaaaaccaagctcgtcgataatcatctgtatcattgttaatctgtgctgaacatctataaaattattgtgctttttcaatggagacataaaactaggtaaaaaataaaattcatctggctgtaattcatgaaatacttcgctagctactatcatatgtgcagtatggatagggttaaactgaccgccgtaaagtactatctttttcattattatggcaattcaatttctttattttctttagattctctataaatcactatcatagatccaatcacttgcactaattcactacgcgtagcttcgcttaatgtttcagctaattcttttttatcatcaaagttattttgtagtacatgtactttaatcaattctctgttttctaacgtatcatctatttgtttaatcatattttcgttgataccgccttttccaatttgaaaaatcggatcaatattgtgtgctaaacttcttaagtatcttttttgtttgccagtaagcatatgttattctccttttaattgttgtaaaactgctgttttcatagaattaatatcagcatctttattagtccaaattttaaagctttccgcaccttggtaaacaaacatatctaagccattataaatatggtttcccttgcgctctgcttcctctaaaataggtgttttatacggtatataaacaatatcactcattaaagtattgggagaaagatgctttaaattaataatactttcgttatttccagccatacccgctggtgttgtattaataacgatatcgaattcagctaaatacttttcagcatctgctaatgaaatttggtttatatttaaattccaagattcaaaacgagccatcgttctattcgcaacagttaatttgggctttacaaattttgctaattcataagcaatacctttacttgcaccacctgcgcccaaaattaaaatgtatgcattttctaaatctggataaacgctgtgcaatcctttaacataaccaataccatctgtattataccctatccacttgtcatcttttatcaaaacagtgttaactgcacctgcattaatcgcttgttcatcaacatgatctaaatacggtatgatacgttctttatgaggaattgtgatattaaagccatctaattcttttttcgaaataatttctttaattaaatgaaaatcttcaattggaatatttaaagcttcataagtatcatctaatcctaaagaattaaaatttgctctatgcataacgggcgacaaggaatgtgaaataggatttccgataactgcaaatttcattttttaaatcaccttataaaatagaatttcttaatacaacatcaacatttttaggaacacgaacgattactttagctcctggtcctatagttataaagcctagaccagagatcataacatcgcgtttctctttgcctgtttcaagtctaacagcctttacctcattaagatcaaaattttgtggatttccaggtggcgttaataaatcgccaagttgattacgccataaatcattggccttctccgttttagtacgatgtatattcaagtcattagaaaagaaacaaactaacggacgtttaccacctgatacataatctatgcgcgctagaccgccgaagaataatgtttgcgcctcatttaattgatatacgcgttgttttatttctttcttaggcataataattttcaattctttttcactaactaaatgcgtcatttggtgatcttgaataatacctggtgtatcatacataaatgatgtttcatctaaaggaatatctatcatatctaaagttgttccagggaatcttgaagttgttactacatctttttcaccaacactagcttcaatcagtttattaatcaatgtagatttcccaacattcgttgtccctacaatatacacatcttcattttctcgaatattcgcaattgatgataataagtcgtctatgccccagcctttttcagctgaaattaatacgacatcgtcagcttccaaaccatattttcttgctgttcgttttaaccattctttaactcgacgtttattaatttgtttcggcaataaatccaatttatttgctgctaaaatgatttttttgtttccgacaatacgtttaactgcattaataaatgatccttcaaagtcaaatacatccacgacattgacgacaataccctttttatccgcaagtcctgataataattttaaaaagtcttcactttctaatcctacatcttgaacttcgttataatttttcaagcggaaacaacgtctgcaaatcacgtcatcacgaaacatattatgctctggtacaaaaccaggtttatttttatcttcagattgaagtggcgcaccacaaccgatacattttaaaatgtcagacaatcaattttcctcccatgtgatataaccttttttactgaaatgacgtaataatcgtctttcaattaatctattaaacttagtaataaagccatcagttcgtttaactggaacaaccataattgtatatagacctcgacgattaccaccaaatacatcagtaagcatttggtcacctataacaacagtttgatctggtctgatattcatcttagttattgctttatcaaacgctttccccattggctttctcgctttaaaaataaaatcgatgtctaaatgctgactaaaactagcaacacgagactcattattattagacacgattgtaatagtgattcctttttcattagcttccttaaaccatgctttaacacgttctgtaggttctttaacatcccaacctactagcgtattatctaaatctgtaataatacctttaacgcctttgtccactaacttgtctaaatcaatttgaaatattgattgaacatatgaattcggcataaaaaacttgcgaactaaacccatttaactcacctttacctttttataattgagacactaatgcttcaacagtttgacttgatgatacagctgctttttctaaaaatgcttcgaagctcatttccgcttctccatttgctaagtctgaaactgcacgaactacaacaaatggtacattaaattgataacatgtttgtgcaattgcagttgcttccatttcaaccgccatcgcatttggaaatgcttttttaattttttgacgttgttcaacactaccgataaagctatcaccacttacaattaagcctactttagctgttaattgttgttgttgtacaacttgagatactttttctattaaaggtttacttgattgaaatgctaccggcatctgtggtatttgtccatattcataaccaaatgctgttgcatccgcatcatgatattttacatcatcacttataagaacgtcacctacatttaaactttcatctaaagctccagcagaacctgtattaataatgacgtccggtttaaacttattaattaataatgtcgtagaaattgcagcattaacttttccaatgccgctttgggtaatcactacttctctatcttttaaaatgccagtataaaatttaacatgtgcaactgaaatttcgcttaattgtgttaatttattttttaatattgttacttcttcttccatggcaccaattataccaatcatcctttgattcacctcttttaaaaaatcctagcatttgttattttatcacattttaatcactacaacgacaagtatcatgattttcattactgtataaaacttttgctttatttttataaaaagctctttcaataacttggtatcataaataattatttttgaactcataacagtgaattcgatgcttctaatttgtctatttttcaaaaactaatcatatcaattacatcaaccaatcgtgtcaagaaactttattaaataacaggaaaatgatatgtttaaaataataatgatgaaataagaggattttacaatggctgaaaataatcaaaatagtctcgtaacaaagatagctacatacggcagttttattgcaattgcgtcgtttgtcattttatttataagtatatttttaaagttttcatttaatatcgagtttacagcaacaattatgaacatatgtcgctacactctaattctaggatttatacttatgtccttacctgatgttgttgataaaaacatcaagaaaattatattcgatgcatttattatcatcgtctttatcttctttttactatagtagttttattttgtaattacacagttaatcatatttgtttcgtatcgaattcctgtgtgtattaaagataattctaatagaaaacagcagtaagacttttctaagtgttatcatccttactgctgtttttatttgtaacagtataatgacaggtactttatatttcactgtcaaagattattaatgattaacttaattaaattatgatttgaataaatagatatctaaatgcaatttgtcactattgatagttttattatcagcatacatttttaatacctcataaccatactcaccatttaaattataaaaattatattctatattttgttcatcatcattatgatatttaacataccctttaacaatgtcgccaccttgttcgtacaacttatacttctcattcaaataatttcttaattgaacatctaattcttgaatggtaacaattttctttttcgtttttactgctgttaattctatttctgcttgatgtccgtcaatccataaattacaaggtatattcttataatcatcgtacttattattgtcacttaaagtaacaccaccataactacattgcgttttattggttgctcccccatgacatccatatccataatttccagcaaatatatcgatatccttatttataaatttctttgaaagtgcctcattttcgaattcaactttaaaatcttttttccaatcatcatttacgaacatgtcatgaaataacaaatcatgcttcaacagtctatcgtttgtgtttttattttcaagctgagttggattgatgaatgacatcttagcattacttagacgctttgaatcaaacttacttttatgatgtaagtctgaatattcgattgcacttgctgaatttgtcaaaatttcttctaacaataatattaaaataaatcctgttaaatatttaacttcaaactccccaaaacaattattaatttacatttgagagcgagacataaatgataaacaggctgggaaataaatcaatgttctatgctctacgaagttatattggcagtagttgactgaacgaaaatgcgcttgtaacaagtttttttcaattcaagtcaggggccccaacatagaagctggcggaaagtcagcttacgataatgtgcaagttggggtgggacgacgataaagaaatactttttctatagaaattagtatttcttatgcatgagttttactcatgtattcctatttttaagtacacattagctgtggctaatgtgtaagaaccactacataataaatcattagtggctctttatcatttctgtcccactcccttgagcctacaattttgattatgtatcacgttcataatactttccaatttgaaataccctgttcgcaattattagttgagttatatcaaccaatacagtgtaaacataaaaattccaaaccgtttaacagtatatcagaaaaaatgataatcatttcttttatttttattaaatttcataatgattcatataatattcgcattaaaacatcacaatactgatacacaacaaaaagagcagtacatttgtcatgcaccactctcaacaaatatatttttcaatgaagcaattacgcgatcttacaaatactataagtatagctgaatcacatattatatttattttataatagaatttagaaattcatcacttatctcataaattattggtctacttttaattttaactaagtagttatcatattttttaattgtattattaatttttactcttcctactcccaatatgttttctaaatcaattaatgttaatctatttcttttatttccaaacaatttatccattgaaaggagatacaaaaattcataatctatctgtttataatgactagttaaataaagcgttaatttttcagtcgcatccatttttggtattaactcatcaagtattctttcttgtcctgctatcaatagctcaagcattgtgtcaataaattccgtcaaatcaccacaattcaaatgatttgaagcagtcataaacgccttgtaatatttcgatttatttctatttataacatatgaaaatgtcaaagcagtataattatcataataatcactcaagagcttggcaattataaatcttccaactctaccattgccatcataaaaaggatgtatatattcaaacagataatgactagccatgattttgaacggctgaggcgcatcaaaatattttaaaaatgttagcatttcacctatatattcaacaattttggtttcaggttgtaacccaacatgtatatatttattcgttgacccatcatgcacaccgacaaaatttttacgaaatagctctccatctaacttatcttgttcgttaatttcatttgaaactaatttatcataaatcgctctaatgtctcttacattatcaactttaatttttttattaagttctatctctttatattgatccacgaggcctctgaacttaagaaattctgatgcttggttatttaacgcatgtgcaatctcttgtttagtactaaatacattttcaatttcattagtactttgtaattcatcgattaataaatcattaaaatattgttctctagctgcatatggtaaagaattaagtgctctatcaatttttctactattaattgatattaattcttgtttttttgatagatttttagtcaccataaagaatagaggatattccaaatcattaactttttttccattttccataggtatgatattaatattagtattgaaagaagctaaagaattaaatcttttagtatactcttccttcattttactttcattgtgttcatgaaaaatactttttaaagttctgtaacccatttgcagcctcctctactcatttaaaatgtattttttgtccaataaatccattttcattagattagctaaatattatcactttttttctttaaaaactatataaatatctatttatccaaacaactgaaacagaagtttcatcacaacaaaaagagcagtacatttgtcatgcaccactctcaacaaatatatctaattatgctttataaatgaatcaccggaaatcaaaatacatcttgcctaatactaacaacatttacagtgatgctattagtcaaaatgtcttttaaaataactgaagtacttctttgaatgagaatatacctgtcaatattgtaacaagtactgcaacgataccaaagatgaacatccaatttgggtgtttataatcaccaacaattgatttctttttacttgcaatcaaaattgcacctaacgtaataggtaaaatccatccatttatcgcgcctgctataattaaaaggctgattggttttccaataaataagaaaatcattgttgaaataacgataaacacaatcacaattaaattacttctttcgttaagtgatttatgaagtgtttttaaaaatgttgcgcttgtgtatgctgagccaattactgatgacatagctgcagcaaataacacaataccaaaaatattctttccaattggtccaattgcgtgttcaaaaactgacgctggtggattttcagaacttagtgtcacacctgttacaacaacacctaataccgctaggaatagtaacgttctcataatacctgtagttaaaataccagcaattgctgattgatttacaaatggtaaatattgcttacctttaatgccagagtctaatatacgatgtgcacctgcaaaggtaatataaccacctacagttccaccaactaacgtaatgattggcaagactaatttcattggatgttctggcgcaaatgtatgcacaaaagcatcaccataaggtggattagaaacaaacatcacatatgccacaactaaaatcatcacaataccaagaatcattgaaacaacgtccataattttttggccacttttacttacaaagattaatattgcaaagattgcagtaatagctgcgccccattttacatctaatccaaaaattgcatttaaacctaaaccggcaccagcaatattaccaatattaaaagctagaccaccaaatgcaatcaatattgagataacagtaccaagcccaggaacaactttatttgatatttcttgacctcttaaaccagttacaactaatatgcgccatatattaatttgtgcaccaatgtcaatgatgatagacagtaatatggcaaatgcgaaacttgcaaaaaattgtgatgtaaatactgctgtttgcgttaaaaatgctggcccaattgcagaagttgccatcaaaaatacagaacctaataataaccttttatgattttttgtgaattcaaagtcactttcttttttaagctttaaatttcttcccattttttagccccctataaggattgaatatcaatgccttctttcattaaaatttctctaattttcgaaacaaataataatgcatgttctccatcaccatgcacacaaattgtatctgcttgtaacgttacttccttattgttttttgaaataactttattttccttcaccatctttaaaacctgcttaagtgcttcgtcagtatcagtaatcacagcatcactttcttttctactaacgagctgcccatcatcttcgtatcgtctatcagcaaacacttcagaagctgtaattaatccgacattctttgcttctgaaattagatatgaatttgctaatcctactaacactagtgatggatcaaagtcataaacagcttgtgctataacgcttgctatttctctgtcttttgcacccatctgatacaacgcaccatgcggtttaacatgattaattttaacttgatgaatgcgacaaaacccttgtaatgcacctaattgataaatcatcaaattataaatctcgtcgttagagatatctatatttcgtctgccaaagcctttcaaatcaggtaaaccaggatgtgcacctactgcaacattatgtgctttggcaagttttaccgtttcattcattacattttcatcaccagcgtgaaaaccacaagcaacattcgcacttgtaattaacggaataatttgatgatcaccaccaaaggaataatttccaaatgcttcgcctaaatcacaattcaaatcaactcgcattataattccacccctttaacaatttgatgtttttctaaaaatttaatatcaacatcttttgcatctccatcacgatatagtggataatttaaaactgcatataaaaaatcggcagttgtagaaaatccatctatcaccatttcatctaaggtggctttcaacttatcaattgctgaagctctatcatgagattttacaattactttagctactaaagaatcataatatggtgaaacttgataaccgtgatatagtaaagaatcgactcgcacattaaagccttgaggtaaatgtaacgctgtcactttacctggtgttggttgaaatttcttttcaggattttcggcatttattctcgcttctatcacatgaccattaaattgaatatcgctttgtgaaaaaggtaaatgattatgttccaataaatacaattgtgctgcaaccaaatcacgttctgctcgcatctctgtaacagtatgttcaacttgtattcgagcattcatttcaataaagtaatgtgcggtatcagttactaaaaattcaatcgtacctgcacttctataatttgctgcacgtgcaactttaacagcatcgttacatatttgttgtcgtctttcttcagttaatgctgcacaaggagattcttcgattaatttttgatttttacgttgtacagaacaatcacgttcccctaaatgtacaaaattatcctgcccatctcccataacttgaacttcaacatgttttgcaacaggtataaaagcctcaacataaacacgatcatcatcaaagtatttttttccttcacttttagcttctttaaatgccttttctaaatcttcagctttctttacaatacgtatacctttaccaccaccgccactggcagctttgataacaactggataaccgatgtctttggcaagcttctcaatttcagacacatggttcacagcaccatttgatcctggaatcacaggaacacctgcatgatgaactgtttgtcttgctgttattttatcccccatcatttccatcgtttttttagtaggccctataaacgctatgccttgttcctcaacggtttgagcaaattttgttgattctgataaaaagccatatcctgggtgaattgcattagcaccagtgatttgtgcagcagatatgatgcggtcaatatttaaataactacctaaagcattagcttccccaatacatatagcttgatctgctaaatgtacatgcaagctttgctcgtccccttttgcataaactgctacagtttcaatcccatattctctgcaagctcttataatccttacagcaatttcacctctattcgcaattaaacaacgaagcatttacttaccccctttacttaatacgtaccaaaacttggtcgtattcaacatttgttccatgatcagctactatttcagtaatttctccagcaacatctgttgttacctcgtttaatactttcatcgcttcaacatatcctataatatctcccttgttaactttgtcaccgacattcacaattggttcagttaattctttactatcttgtaaaaagaatgtacctaccattggtgatttaatgtcatgataatcatttgtcgaaacatcggagttatcattcgcttttgaagctgtcaaatcattattgttcatactttgatttgattgattactgtgtgcagccaaatgattcgagtcagtgaagtcaatttctatttcatcttcaaaatttttatatttaaatttcttaacatcattttccttcactaatttgattatttgttcgattttttcaatattcattttacaaatccccttttaaaattgttgctaattttttcgaagtatgtcgcaagctagatgtatcaaaaattggagtcttttgatgactcttaagaatttcattaaacagagacatttgttcccgattcttatctacagcttcttggaatgatatccatttaaattgaattgtatcttgtggtttcatctgtgctaactttggcagatcaaatttgcatacagttgcaattttggtataaccacctatcgtttgtttatcattaagcagaataataggttgaccatcatttggtacttgaacactaccaagagcaaccggttcagaaatgatatctgcttgattaattggtgcaacgctgtcaccttccaaacgatagcccatacggtctgattgttcagtaattaaatatggatgatttacaattttcgctctagcctcttcagaaaatgcctcgaattgaggtccttgaagaatgtgtataatattattttctggcaataaatcgtcctgtaaatgaatcgtctttccaatgttttctttaaagtcattatttattttcactgttattacatcattagctaataactttctacctttgaatcctcctatactgcttcgggtatgtgttgcataactttcagcaataggaggtacgttgatagaatgaccaaaagtaagataaccgcgtgcacctttggttatagcacctatttttaaaatgtcacctttctcagctaatatgacagaattcattgatatagttttattatttagcgaggcattaacactaccaccggttataacaaatgtattttgcgtattaaattgaatggtaggaccaatcaaagtatattcaatcgctggaccatcattgttaattaataactgcgcaaccttaaaactaaattgatccatggcacctgcgcctgaaaatccaatatgttcataaccttttcttcctagatcttgtaccgttgaaaagagacctggttgtaaaatcttaattgacattttcaatcaccacccagtcatcaacattaaagttgccatctgatatatctctttcgatttgtataaattcttgttcatctattgcataaaattgtatccattctcctgcttcgtacattgacattggttcacgctcgctgctaaatacttttaacggtgtgcgtccaataatttgccatccgccaggagaatctgatggatatagtcctgtttgattattcgcaatacctacagaacctgcatgaatttttaaccttggctgattacgtctaggtgtatgtagttgttcatcaagtccgcctaagtatggaaatcctggcataaatcctagcatatatattaaataaggtttacttgtatgtttttcaataacttgctcaacagttattcgattatgctttgctacttcttcaatatctggtccatatgtaccaccatattgaacaggtattttaataatacgattggtttgattcacagcatgaacatttttttcattaaatttgttaagttctaaattttcaattaatttagaagatgttatagcttgttcatcaaaatatattagaactgctcgatacgaagggacaatatcttgaatttctaatatttctttttctcgtatccaccgtaccattgctgtgacattacgatatgtctcttcggatattttattttcaaaataaatcataattgtctgctcgttaataaatcttacatccactttaaatccccctttgtattgcaataaaccagtattgaataccttttcattgtatcattgagaagcacaagttgtttaataagtaattcaaatagcatacaataacaaatgataatcaatttgttttctcggaaatattttgcttttttaaaatggagtagttaatattgtaactcttacactaatttaggttctgctatcattcggtctgatggaaaatttttacttttcatctgtccgattttttgattttgaatataaaaaagcacgaccgaagtatcattaacacacttcaatcgcgcaattaaacaatctatttgatcatttattggatattaacaatttttacgttcatttcgccaccattaggtagtggaacacgaacttcatcatctaaacctttaccaattaacgctttagccattggtgattcatttgaaatcttaccattaaatgcatctgattcagctgaaccaacgatttgataactttcctcttcatcacctggtaattctacaaacgttactgttttaccaattttaacaacgttgttatctccagtatcttcaatgattaatgcatttcttaacatatgctcaattctttgaatatcttgttcgatgaatccttgttcatcttttgctgcatcatactcagagttctctgataagtcaccaaatgaacgtgcaactttaattttctctacaacttcaggacgcttaactgtttttaattcttcaagttcacgctctaatttttcaaaaccttcttgagtcattggatattgcttttgattttccatattgtcatcttcctttactgaattatactattgcttgctaactaaagactgaatttttgttgtcataatatctattgcaactttattgctcccaccttcaggaataattatatcagcatatttcttagtcggttcaataaattggtcatgcataggtctaacaacacttaaatattgattgataacagagtccattgaacgcccacgctctttagtatctcgtgttaaacggcgtaatattctcaagtctgcatctgtatcaacatatattttaacatccatcatatcacgtaataccttattttctaaagcgaaaataccttctacgataataacatctttaggtttaaaatcaatggtaatgtcacttcttgtatgactagcataatcatatgtcggtacttctactgctttaccatttttcaagtctttaagattttcaattaataaatcattatcgaatgcaaatggatggtcataattggtttctaggcgctcgtcgaaagtcaagtgcttttgatctttataatagtaatcttgagcaagtaaagcgacactatgaccttctaagtttttcataatttcgttagttacagttgtttttcctgagccagatccaccagctatgccaatgattgtagtagctttcattagccaatttcctttctcatcatgttgtttggatatatcgggcgatccactttaatttgaacgatttgtaatggatggcgcgccgcgtctaagctgttaccttcttcatcataaattgcttctactacttgtgtaaatgtttcaatttctggaccaaagaattctatttcttgacctggtttaaagttatttcgttgttgaatagtcgcaatttttgtatcttcattatagtctaataccaaaccacaaaaatcaaatggtgattttttagattgttgttgaccaaacatctgttcttcataaccaggtgttccctcaaagaatgctggtgcagtgtctctatttgcacatttatctaactctattaaccattccggattaatcttaaaattgtcaggatctgccgcatacgcatcaatgactttacgatatactgagacaactgttgcaatataatgaattgacttcatacgtccttcaatttttaatgagtccacaccaatatccatcatttgaggaattgattcgattaattttaaatctttaggactcatcgcaaacggtgtaacttcaccttgattataaaaaacatcaagttcaccattatcatcaacttctaataattcataatcccaacggcaactttgacagcaaccgcctctgttggaatcccttgcagtcatatgattacttaatgtacatctacctgaataggcgatacacatagcaccatgaataaatgcttcgatttcaatatctactttttccttcatttcacgcatttccatcgcgccggtctcacgtgctaatacaacacgatccaatccttcttctttccaatattctacagctttgtaattagaaagtgattgttgagtagataaatgaatttcaagttttggcgcaacttctttacatgtttcgataattaaaggatctgcaacaatgatacctgtcgcaccagtcttttccaaattacgcaaatatgattctagaccttcaatattctcatcatgtgcaataatatttgtcgtaacataaattttggcaccgtaacggttcgcaaattcaacaccttcagctatttcttccatcgtgaaattatcagcatttgaacgtaatccatattcttgaccacctaaaaatacggcatcagcgccataatgtactgctatttttaacttttctaagtttccagcaggtgctaataattctggtttcttcataactgttttaggagttgatttaatctcttctattgtcttcatgattaacctccttaatataccgtttgtttatataagaaaccttcgtcaaatggtcgatgatcaggttgaatttcttcaattgggtccatcaacataaatttctcatcttcatagatttcaggatcttcattgtacaaatctatcgcttgacgatactgttccgttaccacattaatatattcttccgtttgtagaataccatcgattttaaatgaatctatacccgcctcaaaaaatggtgctaattcttcaattaaacaaatgtcgtttggtgacataatgtgcgtaccattgtaatcttcgtaaactgggtaattattttgtctttcttcatcataaagtaataaagattgttcatcattgcgacgttcaattttcatttggcgatcttggaacgtataataattgcctagtagcatacgctttgattggaacatacaagtcattccttgaacttgcacctcaatttccacatttgaattttcttttatattaataatttcatccaaattcagctcacgtgctaagacagctcttgatgcgcctcttttaccccagtaattacattgaaaatgattagttactaacgtctctgcattccaatgaagtggtattggattctcttgcgccttcacatacattactactgctggatccccgaaaataattctgtcaactcgtatttcatgtaaaaaattaatataatcttctacagcatctaaatgataattatgaaataatccattcaccgccgcatatacttttttatcgtttttgtgagctaatgcgacagcctctgtcatttgttgtctattgaattcccctggaagtcttaaaccaaacttttgctcgccaattacaaaagcatctgcacctaaatcaataagtgtttccatatggcttaatgacttgggtgtgacaagtaattctgtcatagtcattctcctttaattgaaatcgctaatccatcgtctatatttaaaaaattcgttgtatatcctggttgctttattaaccactcattataatcttgaacctttttaaccatttgtcttacatttctcgatctaacaatcccaatatccgatacaaaaccgtgatataaaacattatctgtaattacgagaccttggtgctttaaaagtggtgtatatatttcaaaaaatttctttgattgcgcttttgctgcatcaataaatatcatatcataaactttgtcatttacattttcaaattgctctaaagcattaccttcaataattcgaacctggttttcaaaatgataagtagctaaattttgtttagcatattgaatcatcgtttcattacgctctatcgttgtgacatgaatgtcatcagatatagaagcgaattgcatagaactatagccgattgctgtaccaatttctaaaatatttttaacattattcatacgaattaattgcttaattaaatctaatgttaaacgatctacaattggcacttcatttacttcggcaaattcacgcaaaacttcgattgaactattttgatgttgatgtaaatctattaaatattttttatttaggtcatccatgttttaaacttcctttatgtaaaataagtcaatatgattatgacaataaaataaatcagccttcacaattgattataattttgccaaccaattaaatgactgatttcgtgttagacgcaaagctattttatttatagaagcgaatcattcatataaaatttaactttagatattttaccatattttcaataaaattataagcgttaattatttatacattgcttaacttaaaaaaatactcttgcctccccatcttaaggttagcaagagtaaaatctttttaattattcttccatttcagtatttacaacttcttcaatcatgtcccattcttcatcagtttcgattggtactaacttaccaccgtcacctgactcatctggttcattgatcattggtacaagctcaatcatatcgtcttcatctgattgagcaccttcttcagctaagataacatactcttttttgaattcaggatgataaaattctaaaacttttcggtataaaacttcatttccctcttcatcgaataaagttaataattcttcttcgttattaatttctagttgtgaatcatgattatgttcagtcatagtaaaatctccttttaatgtagtgaatctaaatagccttgtaaaataaataccgctgccattttatcaatcacttgttttcttttttgtcttgaaacatctgcttctaataatgatcgttcagcagccattgtgcttaatctttcatcccacatcacaatctcaatagaaggataagcttctaataatttttctttatatgttaacgaagcttcgcctcgaaatcctattgaattattcatgtttttaggtagtcctattacgactgtacccacattatgttttttaataatgtctactaattggtcaatacctaattcattattttcttcattgattcggagtgtgtctaatccttgtgccgtccaacccattatatcactaattgcaattcctaccgttctactaccgacatcgagtcctaaaattttatgttgtaacataaattatttattttgctcttttaaatagtaagaaacaagttcttccataataacatctctatcaatatgacgaatttgatttcttgcttcattttggcgtggaatatacgcagggtcacctgataataaataacctacaatttggtttacggcattatatcctcgttcatctaatgttcgataaacattatttaaaacatctcttacatcttgcgttggaagttcttcatagtcgaatttcattgttttatcaaagttttccatttgcgacactcctttaattacaaatataactcactatcatcatacaatattatggctttaaattatagatttttaatgtaatctttaataaagcttaatgattttgagatattttcaggttgtgtaccgccaccttgagccatatctggacgaccgccacctttaccaccaacgattggtgccatttgtttgataagatcaccggctttaacgttatttgttaaagatttagggacagttgcaaccatcgatactttatcatcaacattacttgcaagaatgataattgtatcttgtagtttagatttaaaatcgtccattgtcgagcgaattgctttcgcatttggtacatccacttcagtaaccaatactttatagccattgatttcttcaacttgattttcaatattacccattttaagtgatgtgatttctttgtcacgttgctctaattgttttaataatgctttttcttcatcttgtaattgtgttaacttatcgactacttgatcatcagatttcactttcagctgtgatttcatcgtattaaatttctcttgaatatcttctaaatataagaaagctgctttacctgttaatgcttcaatacgacgcacaccagctcctgtacctgactcacttactattttgaataagccaatttcagaagtattgcggacatgaataccaccacataattcaattgaaaatggtgccatatttactacacgcacaacatcaccatatttttcaccgaataatgccattgcgcccatttctttagctgaagcaatatccatttcttgaatgttaacgtcaatacctttccaaatttcttcatttactaagcgttcaacttgatcaatttcatcattagtcattggaccaaaatgagagaaatcaaaacgtaaacgatctgcttctactagtgaaccagcttggttaacatgatcacccagtactgatttcaacgctgcatgtaataaatgtgttgcactatggttcttttgaatgtcacgtcgatcattttggttcacttcagcagacactgtagcgccaacatttacttggccaaattgtactactcctttatgcaagttttgaccatttggtgctttggttacttcactaacagcaatttcaaaattgtcattataaacaatacctgtatccgcaacttgtccaccactgactgcataaaatggtgtttccgttaacatgaagtatactgtttcacccgcttcaacttgtgaaacttcttcaccattatatatcaagtgtgttagtgttgtttgagctgtcgcagtatcataaccaacaaaagtacttgcagatgtaatatttttcaatacttcactttgaacttgcattgattgagaattttgacgtgcttgacgtgcacgatcacgttgttgttgcatttctgactcgaatgttgtcatatcaactttcaatcctgcttgcactgctatttcttcagttaattcaattgggaacccgtacgtatcatacaatttaaatgcatctttcccattaatttcatttgttgtcgctttagcttttttaattaattcatttaaaatcgctaaaccatcttctaatgtttcatggaatcgttcttcttcagactttataacacgcttaatgaaatctgctttttccttaacatttggataatatggttccataatgtctgcaacaatatcaacaagtttgtacataaatggctcattgattcctaacgtttgactaaaacgaacggcacgacgtaacaatcgacgtaatacatatcctctaccttcattggcaggtaatgcaccatcagaaattgcaaatgcaatcgtacgaatgtggtcagcaattactttaaatgccacatcttgttcgttgtttactaaatattgtttacctgatactttttcgatttcattcattataggcataaataaatctgtttcatagttagtacgtacattttgagaaactgaggccatacgctcaagccccatgccagtatcaatgtttttattaggtaatggtgtgtaactatgatctttattatgattgaattcactaaatactaagttccatacttcaagatagcgttcattttctccacctggatacatttcttctgccggatcgtcttgtccatatgcttctccgcgatcatagaaaatctcagtgtttggtcctgaaggcccttcaccaatatcccagaagttaccttcaatgcgaataatacgactttcttcaagcccaatatctttatgccaaatgttgtatgcttccatatcttccggatgaatcgtaacgtacaatttatctggctccatccccatccatttatcactcgttaaaaattcccaagcaaattcaatcgcttcttgtttaaaataatcaccaattgagaagttacctaacatttcaaagaatgtatggtgacgcgctgtgaaaccaacattttcaatatcatttgtacgaatagctttttgagagtttacaattcttggctttttaggtgtttcacgtccatcaaaatatttctttaatgttgctacacctgaattaatccataataatgtatcatcatcaattggcactaatggtgcagaaggttcaaccatatgtcctttttcaacaaagaaatctagatatttttgtctaatttcactcgcttttaactttttcatcttttacacatcctatttactgtttttaaattaccattccataaaaattgatgacacagatagtcgatttgaaaaactagtataaatcaatatcattttttattattaaaaaataaaaaacgcccatcctcaaaagggacgaacgttatcgcggtaccaccctagttataaatgcaattcaacacatttatcactttaaatcgactatacagttgtgcataaagtagcgttcactaatgtttgttgtacttttcaccaaccagtacatctctgataaacaaatcattaactactcatctttatacgaatttaattctattttagttacatttactcttgttgtcaacgttctataaagtcatacggcgtgatttctcccatattaatcattgggtcaattttaaacattgtagcttccgttaatacatttatatctgtttttgttgaatcagacgtaacttctccactatcattcgatgacattggcgcttctacttgatcatctattgtcgtttgtgaagctcctgtatcattagttgctgtgttttccagcatttcttcatcttctgaattaaaataatttttcaacaatgtacataattgtgttaaacgcgcttgaccatttgtttttaatccaatatcaaatgcttctggatcaccaagtagaactaaactcgttttcgctctagttaaaccagtatataatatcggtctttgtaacattctaaaatactgtttaacaataggcatgataacaataggaaattctgaaccttgtgatttatggattgatgtacaataagcatgtgttaattccatcatatcttgtttcgtaaatgtaatttcattaccttcaaaatccacaacaagtacatctttattaagggcattttctttcgcccaaaaaataccaacaataactcctatgtcaccattgaatatgttatcatttggcctattaacaagttgtaatactttgtcaccttttctaaagactacatcaccaaactcaatttctcgtgtgtctttctttttagggtttaaaatatcttgtaaaacttgatttaaacgtttaataccggcatttcctttatacattggtgcaagcacttgaatatcagccatagtataccctttattaacagcactagtaactaccttctctacaactgttggtatttggtttgcctgacagttaataaaacttctatcatgaaaacgctgtgtaatatcaattttctgacccaacttcattcgatgtgctaattctataatgcttgaaccatcttgttgacgatatacttcagtcagattaactcgtggtatagctttcgattcaattaaatctttaaatacttgaccaggacctacagaaggcaattggtcctcatcacctacaaatatcaattgtgcatctaaaggaactgcacttaaaaattggtggaacaaccaagtatctaccatagacatctcatcaatgattatgagtcgtgcgtttatttcattttctaatatatcctctggctttgtgtcttgattccaacctattaaacgatgaatcgtcatagcttctaatccagttgactcttgtagtctcttggacgctcttcctgttggcgctgctaatacaactggataatcatcattgacataatcatcataatctaatgataagccatgaatctcagcatataattcaacaatacctttaattactgtcgtttttcctgttcccggtccaccggttaatagcatcaccttagaattgatagccgtttgcaaagcttctttttgtgaagctgcatagttcacttgattcgcatcttctatttcaccaatatgcatttgtaaatctgactgttcaatttctgtaagtttatttgtatgcgtctttattctgaataagttttgaacacttttgatttcagaataatacaaacttggaattgcaacttgttcattgtcaataattagtcgtttttcctcatttaagtattgcaacatttcgtctaatttttcaggttcgatgacctcttcatcttgataatttaatacatcaaccgttaaatctataacaacattgataggcaaatatgtatgtccctgtttaatacattcttcttctaacgtatagagcaacgcagcttttaatcgttcattatcgttataagcgataccaatatttctagcaagttgatctgctttattaaaaccaatacctttaatatcataaatcaattgatatggatttcgatctaaaatagtcagtgtatcgccgagataaaactgataaattgccattgaaagtttaggaccaaaccctaaatcatgtaaacgaatcattattttttcagattcttgatttgctgaaatttgttctgcaatttgtttctgtttctttttagataatcccgaaactttttctagcactgaatggtcatctaatatatcatttatcgcattgtcacctaatgtattaacaatattttgagctgtctttttacctacacctttaaacaaatcactagataaataacttataattgcttctttcgtttgtggcatttctttttcaaaagtctctgcttttaattgtttaccataacgtggatgatcaacaacttgccctttaaatgtgtagacatcgccttcaacaatattcggaagaaaccctacaacagttggcattgtatcaaagtcttcatttgtttcaatagtatctactttaagcactgtataaaaattatcactgttttgaaacaatatcgcttcaacagtacctttgatcattgaataatcaaatagtgtagggtctgacatgttactcctcctctttcattttagtgaatgttttcagcgcatgctgacttaataagtgtttagggtcgatagtcacagcttctttaaaatgagttattgcttcatcaatatcttcatttttcataaataacgctaagcccaaattgtatcttgcatcaacatgatttttatcaatcgttaatacatgtttaagttgagttatggcttcattaaacatttctaattgacataatacaagaccatattgaaattgaacttctgcatctttgtctttatctagttccgcagcagtcattaaatacggcaatgccagcttaaatgattctaactgattaaacgccataccgatcatataattacaatcaacttgttcaatctctgtttgtaatgcttgttgatataatttaatagcttcttgataacgttgctgattataatatacatttgctagattataaaatacgacgccattcttcggatctattgttaaagctttttggaaaaagcgctctgccttttcaatctcattcgcatcagcaagtacgataccagcattaatataattttcaataattgtaggattttcttcgatatttccgaacaatgcttgtaacgcttcttctatttttccattttgtatgtattgataaattgtttgttgatctatcatttacgaacctcatttctcatcaattataacatcttgataaattgtatgtctcgaatcacttaacaacgaataaaatataatctaatatcatcttcattcatgaaaaagcgggaatggaatagaaatgattaagaaccattaacggtttattatgtaatggttcttccacattagccactactattatgtacttaaaaataggaatacataattagactcatgcatagggagtgggacagaaatgatattttaacaaaattaaattcgtttatccccaactcgcattgcctgtagaatttctttacgaaattctctgtgttggggccccatccccaacttgcacattattgaaatctgacttttggtcagcttctgtgttggggccccgtccccaacttccattgcctgttgaaattggggtcccaatttctctgtgttggggccccgccaatataacattgtagagcctaggacattgtgatgtcccagactctatcatcatgaattattctcatcaaaaactgtctttcgtcattttcgacgttgaaacttcaaataagtaatttattgttgccattgtttatacaacataatttaattgaccttcatttttgaacacatcgtcaattgttgctccaccaagacacacatcaccttgataaaaaacaactgcttgtccaggtgtgattgctcttactggctcagcaaaagtaacacgtagtgcatggtcgttttcacgtttcacaaaaactttcgtatctttttggcgatatctaaatttagctgtacattcaaaaccttgatctaagtcattatcttctggatttacaaatgaatagtctgaagcaattaagtaatcactgtataatgcatcgtgatggaatccttgttctacatataaaacattatcttttagatttttaccgacaacaaaccaaggatcgccatctccacctatacctaaaccatgtctttgtcctattgtgtaatacatcaacccactatgtttacccattttcttaccatcaagtgttatcatatcacccggttgcgcaggtagatattgagataaaaatgttttaaagtttttttcgccgataaaacaaatacctgtagaatcttttttcttagcagtaactagtccttgttcttcagcaattcgacgcacttcaatcttttcgatgtcgccaattgggaacatcacttttgaaagttgttgttgggataattgattcaagaagtatgtttgatctttattattatctacaccacgtaacatttcaacatgaccatcttcatgacgatgtatgcgtgcgtaatgccctgttgctacataatctgcacctaaattcatcgcatgatctaaaaaggctttaaacttaatttctttattacacataacgtctgggtttggagtacgaccttttttatattcatctaagaaatacgtaaagactttatcccaatattctttttcaaaattaacagcgtaatatggaatgccaatttgattacacacttcaataacatcgttgtaatcttcagttgcagtacatacgccattttcgtcagtgtcatcccagtttttcataaatatgccaatgacatcataaccttgttcttttaagacgtgggctgttacagaactatctacaccgcctgacataccaacgacaacacgtatatctttatttgacaattatgactcctccttaaatttaaaatatattttatgaatttcagctacaattgcattaatttcattttcagtagtcaattcgttaaaactaaatcgaatcgaatgatttgatcgctcttcatcttcgaacattgcatctaaaacatgcgacggttgtgtagagcctgctgtacatgcagatccagacgacacatagatttgtgccatatccaacaatgttaacatcgtttcaacttcaacaaacggaaaatatagatttacaatatggcctgtagcatccgtcattgaaccatttaattcaaatggaatcgctctttcttgtaatttaactaaaaattgttcttttaaattcattaaatgaatattgttatcgtctcgattcttttctgctaattgtaatgctttagccatcccgacaatttgtgcaagattttcagtacctgcacggcgtttcaattcttgttcaccgccaagttgaggataatctaatgtgacatggtctttaactaataatgcaccgacaccttttggtcctccaaacttatgagcagtaatactcattgcgtcgatctcaaattcgtcaaacttaacatcaagatgtccaattgcttgaaccgcatcaacatggaaatatgcatttgtctcagcaataatatcttgaatatcataaatttgttgcactgtgccaacttcattatttacaaacataatagatactaaaatcgtcttatctgtaattgtttcttcaagttggtctaaatcaatagcacctgtatcatcaacatctagatatgttacatcaaaaccttctcgctctaattgttcaaaaacatgtaacacagaatgatgttcaatcttcgatgtgataatgtgattacccaattgttcatttgcttttactatgcctttaattgccgtattattcgattctgttgcaccactcgtaaatataatttcatgtgtatctgcaccaagtaattgtgcaatttgacgtcttgactcatctaaatatttacgcgcatctcttcccttagcatgtattgatgatggattaccataatgcgaattgtaaatcatcatcatcgcatctactacttcaggttttactggtgtggtcgcagcataatctgcataaatttccatgtttggacactcctcacaattttatcaatgttccaataatagcaccttacatactatttttctacttttctgtttaactttatttataatgtttttaattatattttaccattttctacacatgcttttcgataggcttttttaagtttatcgctttattcttgtcttttttataaattttagtatttgcagatattttttcattcgtaaaatgtaacgtactattattttggttatgagcaatttaatatttatctggttattcgattggtatacttcttatatcatacaaaaggaaggacgatacaaaaatggcgattaaatattcagcattaaaccttgtccctattcgagaaggtgaagatgaacgaacagcaattaatgatatggttaagctcgcacaacatttagacgaattatcatatgaaagatattggattgctgaacaccataacgctcccaacctagtaagttcagcgactgctttattgattcaacatacgttagaacatacgaaacacatacgtgtaggttctggaggaatcatgttacctaaccatgctccattaatcgttgcggaacaatttggcacgatggcaacattatttccaaatcgtgtcgatttaggattaggacgtgcacctggaacagatatgatgaccgcaagtgcattaagacgagatcaacatgatggtgtttataaatttccggaagaagtttcattattacaacaatatttcggtcccgctcaccaacaagcatatgttcgtgcttatccagcagtaggtaaaaatgtgcctttatatattcttggttcttcaacagattctgcacatttagctgctcgtaaagggcttccatatgtgttcgctggacattttgcacctcaacaaatgaaagaagctatcgaaatttacaaaacgttatttgaaccttctgatgtattagacgaaccttatgttattgtatgtttaaatacaatcgttgctgaaaatgatgacgaagcacaatatttagcttcatctatggcacaagtaatggttagtatcactcgtggcagaatgcagcccgttcaaccgccaacacatgaactacaaaatatattaacgccgagagaatatgcgatggctatggaaagacagaaaatatcattaataggttcagaaaatactgttcaacaaaaaattcaagattttatggaaacttatggtgaagtcaacgaaattatggcaataagttatatttatgataaagatatgcaattagactcttatcgtcggttcaagaatgttataaatcagataaatgaaaaaaacactttataatgtgataaataaactaagtgaaagtatgtatccataatattaataaaaataaacagtaacagcattttgaataaaagatgtctttattgttcaatcatttattttagtaatgattcaaattcacttaaaattctaaagcaaatatgaaagcgccccttcaactttacactgtgttagtgtttatttgatggggcgctttcaaaatattgaaaagcatatccaaaatttaaagaaatttatttctctttatcttcattttcttttttctcttcgttattcgatcctgtatattcatttatcttatcttttacatttttaacttgttcattatcgctatttttaaatttttctactgcgtctttagctttatccataaaactcatattaatcgctcctcttatatttaattagtttaattgaacttattttttaagtttatcaattgcatcagttattttgtttttagcattttcaacaacttcttttgctttaccagtcgctttatcttgctgaccttctttttctaattctttgttatcagtaacgttacctactgtttctttaacatttcctttaaattgatcgaacttactttcgtctgccatagtgaaacctccttggatgtatatatttatataccactaaggaggttcgctaaacattataatatgaagtttttatgttatagtatagtatttatacgattaaatataaaacatgtatccgtctaaatcttcgcttgtatctacatattccgctaaatatttcaatgttgtattatctaaaacatctctcactgcatctctcatgcgaatccatagttgtttttgcgcaggtggttctgattcaatactttcaacaaatgtaattggaccttccaacagtcttataatatcccctgctgagatttcttccgctggcactcttaattggtatccacctttagcaccgcgtacacttcgaattaaccccgcatttcttaaaggacctacaagctgttctaaatataaatcactcaaattattttcttcagcaattgactttaatgatatacatccttgcccctcttttttagcaagagaaatcatcaatgtaagtccatatctccctttagtagaaattttcattgtataacctcacttaattcgaatattgatattcccattttagcattttttgagttaagatagtataagaaaggtgtgacaaatgtgagtacagaaccattagcatcgagaatgcgcccaaaaaatatagatgaaatcatttcccaacaacatttagttggaccaagaggcattatcagaagaatggttgatacaaaaaaattaacttcaatgattttttatggtccacctggtataggcaaaacaagtattgccaaagcaatttcgggcagtacgcaatataaattcagacaattgaatgctgtaactaacactaaaaaagatatgcaacttgttgttgaagaagctaaaatgtctggtcaagttatcttgttattagatgaaatacatcgactagataaagctaaacaagactttttattacctcatttagaaaatggcaaaatcgtcttgatcggtgctacaacttcaaatccttatcatgctatcaatccagcgattcgttcaagagcgcaaatttttgagttatatcctttaaatgatgaagatgtgcgccaagcgttaactcgtgcaatagaagatgaagagaatggtttgaaaacatatcaacccaaaattgatgaagatgccatgacctacttttctacacaaagtcaaggtgatgttcgtagtgcgttaaatgcattggaattagctgtattaagcgcagataatgacaaagacggttatcgacatgttacattgcaagatgctaaagactgtttacaaaaaggtgcatttgtaagtgataaggatggggacatgcattacgatgttatgagcgctttccaaaaatctatccgtggtagcgacgtcaatgccgctttacattatttagcacgattaattgaagctggagatttacctacaatagttcgacgattacttgtaattagctatgaggatataggcttagcctcacctaatgctggtcagagaacacttgctgctattgaatcagcagaacgtctaggtttaccagaagctagaattccactaagccaagcagtaatcgaactatgcttatcacctaagtcaaattcagcaatgagtgccattgatagtgcattgtccgatattagaaacggtcatgtgggccaaattccaaaccatttaaaagatggacattatcaaggtgctaaagatctaggccgatctattggttacaaatatccacaccaatatgttaatggctatgtttcacagcaatatttacctgataaacttaaaaacaaaatttattatgaaccaaaaacgacatctaaaagtgaacaacaactcaaagaaatatataacaacttacttaaacaaaggccgtaaaaataagattaaatcgattacctttgatattttagctataatcaaatcaaaactgactagtatacgaggcatattctactatgcttgcgaactagtcagttttagttttatggtgtggttacacttgccttacgttgaaaattatgactttcaaaatgaattattgccctttgtctttaatgcgacgaactggaatatcttttaatacgtcattcaccacataactagcacaaattaatccaacaacacttggcacaaaggcatttgaagaaggtggcatttgtccttttcgattgatagcatttttatctccaactatatcttttacatcttctcttatgacaattggactttcatctgaaaatacaactggaatccctttacgaattcctagttttttcaatttttgacgaataattttggccattggatcggtatgtgttttagagatatctgaaattgtaaaacgtgttggatctgttttatttgcagcacccatactggaaatcactttaatccctcggtcaagacactctttcattaagtgtactttgtacattattgtatcacttgcatctacaaaataatctatatcgtagttatcgaaaatttcttcatatgtctcttctgtataaaacatatgtaagggcgtgactttacaatctggattaattaatttaatacgttcttccatcaaagaaactttactttgtcctaccgttgtagttaaagcgtgtaattgtctgtttacatttgtaatatcaacatcatctttatctattaatataatatgaccaatattcgttcttgctaatgcttcagcagcaaatgaaccaacacctccaacgccaagtatgacaacagtttgttgcttcaataaatctaaaccttgttgtccaatcgctagttcatttcttgaaaattgatgtttcattattttacctctttcactgatttatacataagtacatagtaacttaaaattttatatttagcattatcgctttgattattttcccaaaattcaacgaggaaacatttattaaacgctataaaacccaactaattctttattaaaaacttaaagaaacgcataaaaatacgcaagacaaagtcttgcgtatcgatagagtccgtattgccgtagttataatagcttgatcattcggcctgttatatacaggtgggtgccctgtttcttgttttgtacgtccttcatataaggcgtgtacgctgcaagaaaacccattgggctcccttgatcaaagagtgttaggcccaaattaaaaagcaaacttacgaacaactcagatgactatcttatgatgttatattaccacataattaaaattaatgaaattataacaaaccaaagtttattgattttttaaaatttagtgacgaattcgcaaagaaagttcttctaattgtttatcagaaacttcaccaggcgcattcgttaataaacatgtagcagatgctgttttagggaatgcgattgtatctctcaagtttgttctattagtcaataacatgactaatcggtctaatcctaatgcaataccgccatgtggtggtgcaccatatttaaatgcatctagtaagaagccgaactgttcttgtgcttgttctttagtaaatccaagaacttcgaacattttttcttgtaactcaccatcatgaattctgattgaaccgccacctaattcataaccatttaatactatgtcataagcatttgcctcagcttcttctggcgcagtgccaagcttagcaatatcagcttcttttggagatgtaaatggatgatgtgctgcaacgtaacgtttcgcatcttcatcatattccaataatggccaatctgtcacccataagaagtttaattttgtttcatcgattaaacctaattctttagctaatttgacacgtaatgcacctaaactttgtgcaacgacatttggtttgtctgcaacaaacattactaagtcaccagcttcagcaccagttaatgtaagtaatgtttcaacattttctgtttcaaagaaacgtccaattggacctgtcaaaccatcttccacaactttaacccacgctaatcctttagcaccatagatgtttacaaattctgttaaagcatccatatctttacgagtatattgttcagctgcacctttagcgacaattgctttaatttcaccatcattttcaacagtatctttaaatactttaaagtccatatcacgtcctaattgagaaacgtcaattaattccatttcaaaacgcgtatctggtttatcagaaccatagcgacgcatcgcttctttatatgtcatgcgtgggaaagcgccattaatttcaacgcctttaacttctttaacaacttttttaagcatttcttcacccatttgcatcacatcttcttggtctacaaaactcatttcaatatcgacttgtgtaaattcaggttgacgatctgcacgtaaatcttcgtcacggaagcattttacgatttggtagtatttgtcaaatccactaatcatcaataattgcttaaataattgtggtgattgtggtaatgcataaaattcaccatcatgaacacgagatggtactaaatagtcacgtgcaccctcaggtgttgacttcgttagtactggtgtttcgatgtcaaagaacccttcatcatccaaatattgacgaatagaacgtgtaatttgatgtctcattttaaatgtttgcgctaactcttgacgacgtaaatctaaataacggtattttaatcgaatattttcatcaacgttaacattttcttcatttatagaaaatggtggtgtctcagatttattaatcactttaatatttgtaacttgtacttcaacttggccagttttaattttaggattaactgtttcagggtcacgcttcgtaactgtaccttgaacttctacaacatattcagaacgtactgtttcagcaattttcaatgcctcttctgaaaatgcaggattaaacacgacttgtacaattccttctctatctcttaaatcaacgaaaatcaatccacctaggtcacgacgattgttaacccatccttttaatgtaatttcttgtcctaaaaatgcttcagtaactaatccacaataagttgttctcttactcatattttaacgccctctctacttcttaaaatattcgactaatgcgtctaattcaattgtttcagattcaccagttgtcatatttttaacatcgattttattattttctaattcttgatcaccaataacgattgtaaacttggcacctaaacggtctgcttgtttcatttgtcctttaattttacgctgtaagtagtctttatctgctttaataccattatgtctcaaatgatttaataacttcacagcatatcgatctgcttgatcacccattgtaacaatgaataaatctaagttttcttcaatatctaattcgataccttcttcttcaagtgcaagcaataatcgttctatacttagcgcaaaaccaatacctgtttcacttggaccatctagcaattctaataaaccattataacggccaccaccacaaagcgttgtaatggcaccatcatagttagggttatccatcattaattcaaatgctgtatgtgtataataatccaatccacgaactaagttaggatcttcaatatatggaatacctaaatcatctaaataagcttttacttgttcataatatgccttagattcctcatttaagaaatcagtgattctaggtgcagtcttaatcgcttctttatcacggtcaactttacaatccaaaattcgcatcggatttgtatgcaaacgtgattgacaatctgaacaaaattcatgaattactggttcaaagtgtttcactaacgcttcgttatattcttttcgagacgccatatcccctacactattaataacaagctttaaatgttttaatccaaatgattgataaatatgcataaccatagctaatacttctgcatctacgctaggattttcagcaccaatagcttctacaccaaattgattaaattgacgatagcgccctttttgcttacgttcatatctaaacatcggtccattgtaataaagtttaattggttggtttggattaccttgcattttatgttcaatatatgaacgcacaactgcagctgttccctcaggtcttaatgtaatacttctatcgcctttatctttaaatgtatacatttctttttgtacgacatcggttgaatcaccaacacctcttgcaaaaagatctgtactttcaaaaattggtgttcttatttctttataattataaaatgtcattaattcatctaattgattttcaatgtaacgccatttctttgaatcttcaggtaaaatatcctgcgtccctctaggtattttaatcattttgacatctccctcggcaaactattttatttaattacctttttaaaactaaaactatatacgatcacttaactttgcatgataaatcataattttaaaagcaaaagaaaaagcccttgcacagcctgaaactgcacaagggacgaatatccgtgttgccaccctcattggtttaaaaaacatgcctaattgtaatcatcattactttttataagcgtgcattaaataaacccactcaaaacgtttaacgtacgtttaacggctttacttttcataaagcacctcttcttgtgttcaatgtatataaactactcagcataatctttcagtctatggattatattcctacacaatcttagttagattgctacctatttcatttaccatttcaagaatactaacggttttagttataaaattcaatatcaatgataactactttcacatatttttgcaagccctacgcagaaaaataaattttaaggccatcaacaattgcttgttctaaaatttgtctatgtaattgatctttaatcatcgtttcatcagttgggttactaatataacctaattctaataaaacagcaggaacttttgtttgtcttaacacttgataattttcttgtcttgaaccgcgattagaaagtagacctttcttctgaatcgtagcgtctaacgtatctgctaaagctctttgattatcatgataccaataaactgtcattccatttgcattagatgattctaatgcatcattatgtatactcaaataggcatcgcctttgatatcacgattttctagtgaaacatatgtatcgtctgttcttgtcatcttaacagttgcgccttctttttctaaagtacgctgcaattcttttgctgttttcaacgtatagtctttttctaaacttttatatttagtattgcttgaagcaccctggtcactacctccatgaccaggatcaagcactattgttttaccttgcaaaggatttttctccttcgtattatccgcgacaatatctaaatttgtgtgccatccagctatccaacctttttcattactggatgtatcttcaacttcaatccatttacctactttaccaatctttttaaaatggtcacctttctcaactttatatatgactggatacgcagcgtttggacctgtacgtaattcagcattttcagttatcgtgatgttcccactatcttcactattgctattcagcaataaaaataaaaagatgataaataagacaaaggcaatcactactattagagtacgtttatttttaagaccctttttagataaccatgcctctatttttttcattgaattttgccgtcctgactttcataaataatagtgactggaccatcattatttatgctaacattcatgtgtgttccaaattcacctgttttcacagtaagaccatacgctcgtagcgcatcattaaaatactcataaatttttaccgcttgatcaggatttttagaatttgagaaacctggacggttacctttttttacatctgcatagagagtaaattgtgaaactgatagtatttcaccattcatttgttggatattaaagtttaatttattattgtcatcttcaaataatcttgcattagcaattttctttgcaattacatctgcatcttgctctgtagagttctgaccgataccgactaataaacaatatccttttttgatttgattatttaatgtatcattcgtcaccgatgcttctttaactctttgtacaactactttcatattttgcacctctagttccaaactcttgttactgtataaacatcaccaagttgtttgatcttttctaccacacgataaacatcattcacgtttttcaccatgacactaatatttattattgcatttttatcaatatctgaacgtcctgaaactttaattaaattgccggctgtcgagctaacagcttgtagtacttcattcaacaagccatttcggtcatacgcagttacctctaaatcaacctgatatttttgagttgcgtcttttgattttacccattcaacattaattagtcgttcagtttcgttcttaatatttgggcaatcagtgcgatgtactttaataccgtgacctttggtgatataacctacaatatcatcacctggtataggattacaacattttgacaacttgataagtacattttctaaaccttctacatagacaccactatcagtaatgatgttgtctttaataggcaatgatttcgtaacttcttgtgcttcatttaaagcacgttgtttatctaaaatacgttgtctttcagttaatttattaacaatctgtaaggatgtcacgccgccaaatcctacagctgcgaataaatcatcttcatttgcaaagttatatttttcattaacaacctgaatatttttctctgtcaaaatatcttcgactctaaatccttgctcttttatttcaacttcaaccatcattcggcctttttcaatattagatgaacgatcttgttttttgaagaaacttttaattttacctttggcactagacgatttaacaattttcaaccaatcacgacttggtccatatgaatgtttactagtacgtatttcaacaatatcgcctgtttgtaaaatatagtcaattggtacaattttgccattcaccttggcaccaatcatcttattacctacttcactgtgaatcgcataagcaaaatcaatcggcacagcaccatatggcaactcaataacatcactcgctggggtaaatgcgtatactttgtcactctgtaagtcatattttaaggtttccataaattcttgagcgtcagacgatgtatgatccgcttcagctaattcttttaaccaatttaacttattttgataagtttgatctttttcacttacttttttaccttctttgtaagcccagtgtgctgcaacaccatgctcagcaatttcgtgcatatcaaacgttcgtatttggatttcgagcgggtctccatttggacctactactgtagtatgcaatgactgatacaaattttgtttaggcattgcaatataatctttaaaacgtcctggcatcggtttccataacgtatgcaccaacccaagtatcgcataacaatcattaatagaattgacaataacacgtatcgccaacaaatcaaaaatttgatcaaattgttttttctgcttcatcattttccgataaatactgtaaatatgtttaggtctaccatttatatcgccttcgatattcattcggtccatttcagtacgtattctatcaatagccgtttcgatatacgcttcacgttcactacgtttcttcttcattaaattgactattctaaaatattgcacattatcaatataacgaagagccgtatcttctagttcccatttaattgtattaataccaagacgatgtgctaaaggtgcataaatttctaatgtttctcgagaaattctaatttgtttttcacgcggcatggctttcaaggtacgcatattatgtaatctgtctgctaatttcaccaaaattacgcgtacatctttggcaatcgcaataaataacttgcgatgattttcagcttgttgttcttcttttgagcggtattttacttttttaagcttcgtcacaccatcaacaattcgagcaacttcttcattgaacatttcttttacatcttcaaatgtatacggtgtatcttcaattacatcatgcaaaaaacctgcgacaatcgtcggtccgtctaatcgcatttctgttaaaatacctgcaacttgtataggatgcataatgtatggtaatccgttttttcggaactgacctttatgtgcttcataagcaatatgatagctttttaaaacatactcatattcatctgctgacaaatatgattttgctttgtgaagaacttcatctgcactatatggatattcgttgttcattatatgatacaccccattcatatttattacttcgccttaaacaatgatttaggtactcttgttgaatagtatttgtcccacaccaatcatacgtccgtcgacgataaatatttatcctgtcgtcattaatcgtaatattaattttacttgagcgagtttaatttgtatactattcctacttttaaaacttttacaaaaattcgacctaaatctactgtttcattttttaaatattagttctatgatactacaatttatgaaataaataaacgatgttattaaggtataatgctcaatcatctaacattttcagtaaataaaaaatcctaacatctcatgttaagaaaacttaaacaacttttttaattaagtcattggttcttatacatttgatgaaggatttcatttgataaaattatattatttattattcgtcgtatgagattaaactcataacatcgtaatctttaattttttcaataccatttaaatatttcaattcaattataaatgcaatacctactacgataccgcctaatttttcaactaattttattgctgcttcaatcgtaccaccagtagctaataaatcatctgtaattaacacacgttgacctggtttaattgcatctttgtgcattgttaaaacatttgtaccatattctaggtcatactcataacgaatgacttcacgaggtaatttcccttcttttctaacaggtgcaaagccaatccccattgaataagctacaggacagccaatgataaagccacgcgcttcaggtcctacaacgatatcaacatctctgtcttttgcgtattctacaattttatctgttgcatagccatatgcttcaccattatccataattgtagtaatatccttgaaactaacacctggtttcggccaatcttgaacttctgatacgtattgctttaaatccattaatatttcctcctaaattgctcacgacaattgtgactttatccaattttttatttctgaaaaatcttgatataataattgcttttcaacatccatacgttgttgtcttaattgatatactttgctggaatcaatcgatcttttatcaggttgttgattgattcgaattaaaccatcttcttgtgttacaaattttaagtctaagaaaactttcaacatgaatttaagtgtatctggtttcacacttaaatgttgacacaataacataccctctttctggatatttgtttcttgtttagttattaatgctttataacactttttaaaaatatccatattaggtataccatcgaagtaaatcgaatgattatgttgcaaaactatataaagttgagaaaattgcagttgttgcaaggaattagacaagtcttccattgacgttggtaaatctcttaatactactttatcagtttgttgtttaatttcttcaccataataatattcattcgcatttactttatcacttttaggatgaataagcacgacaatattttcatcattttctgtaaaaggtaaactttttcgcttacttctataatctaatatttgctgttcattcatcgcaatatcttgaataattatttgcggtgattgattaccattccattcgttgatttgaacagatcctaatatattaattggctgttcatcttgtaactcaggttctaagtgtccattttgccaaaatagcgcggcgatattactttcaccaagtgtcaattttagatgatttttttgttgacctatcgccttaactgaagaaactgataaatcatccatttcaaaaataggtctagaaaaatctgttccgaagggtcttaaacgattcatatcacgaatatttttaatcgttatatcattttctgttaataatacatctacttgctttacgggatctaacgaagttgttttagataattctttcatccatttatttaaaccttcagctaacgattctatattttcaatatccatcgtcatacctgcagccatatgatggccgccaaatttagcgattaacccttgatgtgctgatagtatttcaaacatcgacacttgatcaattgatctggcggaaccttttgcatgattttgctccctatcaatatttaaaattaatgttggcaaagcaaatgtttcgacaattttcgaagcaacaatacctaagacaccttcatgccaattttcttttgctaaaagtaaaaataaatctccctttttaactttcgtttctgccatagccattgcttcttctgtgatagttgctacaatatcttttctttcacggttaaaatgttcaacttgttctgctaaaaatgcagcttcttcttcgtcgtcagtcatcaacaattcgcaagctaatgatgcgtcatctaaacgacctacagcattaagtctaggtccaataataaaaccaattgtttcttcatcaatattgtcattgtatcccgcttcttttagcaatgctttaacagaggtcggacattgatcatttaagacttttaatccttgtttcactaatgatcgattttcatcagttaaggatactaaatccgcaatggtacctatcgcaactattgctttaaaataatcaggtacattttcaatcaatgcttgtgctaatttgtatgcaacacctgcaccacacaattgttggaacggataattaaacgatggatgcattggatgtacgattgcatatgcttctggtaatgtactaccaatttcatgatgatcagttacaatgacatcaactcctaaatcttgaaccattttaatttcattatgaccttgtatgccattatcaacagttatgattaatgttatgccttcatcatgagcatttctaaatgctagttcgtttggtccatatccttcggtaaagcggttaggaatatgccatcctacttgtgcacctaaaagttgtaatgttgtcactaaaattgtagttgaggtaacaccgtcagcatcgtaatcaccataaactaggattttctcatcattcgctatcgctcttttaattctttcaatagtcttagtcatatcgctcaattgcaatgcatcatgattgatatctgtatctgaaatgatggattctattgcttgttcatcaataatcgatttactttctaatattttttttacgattggcgttaactttaattttgatgttaattcatcacttatgtattcagctggtttagttaatttccacttatacttcggtttaatcatatatatttacgcctcatttccaaaagacattatatctaaaattactttaaataaaaagcacttatctaaataatcaagactttaattataccattttttaaaaatgaatgcgggaacttatttatatatattttgttaaatttaaataaagtaaaaagcggtatgtgaactctttattgtttcacataccgcttaattcattttaaactaaaatcttttcatcgttcgatttcttttctttatatacaactaatttgtgtttcggcgattttttcagctgacgttttttcattattccccatagcggaacggcaatgaagattgaagagaatacaccagaaatcaatccgataaataatgctaaagtaaagttgaatatcgtaggagcaccgaagaatagtatagcaactactactacaataactgttaatactgtattaattgaacgtgtcattgtctgtctaattgatctattaacgatatcatcaatttgttctgttgtcgtaatcactttaaccttttgtaagttttcacgtacacggtcaaacgttacgattgtatcattaattgaataaccgacaattgttaatacagcggcgataaatgttaaatctacttcaattctaaataaactgaaaatcgctactataatgaatacatcatgtaataatgccaatacagatgaaagacccattcgccattcaaatcgtaatgatacatagatgatgatacctatcgatgcatagattaatgcaagcattgcattttttgctaattcctgtccaataattggtgatacagtattaatttgaggtgtgtcaccgaatttcgatttaatattatcactcaatttattatcttgagcacgcgttaaatcgtctttaaattgaacagttgctactttattgtctttaccattgatctgaatttgatccgctttaagtccactatcttttacaacttgctctaccttttgttgagtaattgcttgtttagattggaaatctacgcgtgtaccacttgagaaatcaattcctaagtttaacttgaagatataaagaataactaaaccgacaactacaattaaaatacttactccaattaatggcttagctaatttaacaaaattccatttctcgaatgaagttttaaggtcatgaacatctacaccttcattaatatcatgtcgtttattctttttaacaccaaataaccaaaattgatttttgaatatatttgatgaaacaagtaatgataataagaatcttgataagaacacggctgtaacaaagatcattagaatacctaataataacattgtcgcgaaacctttaactgaactttcaccgaagaagaataatactgctgcggcgataactgttgttaagttagaatcaaaaattgttaggaatgaacttttgtttgctttagaaaaggcttgctttatcgttctacctattcgaagttcatccttaatacgctcatacatgataatattggcatctacagccatacctacacctaataccaacgccgctaatcctggtaaagttagaaccccggaaatgaaattaaatgctactaacgttagatagatataagttgtcaatgcaataatcgctactaaaccaggtaatcggtagaatccaagcatgaataaataaattaatgctacaccaataaacgatgcaaacacagttttatctaatgcatcttgaccaaattgggcacctactgagtttgaataaatttctttcaagtcaactggtaaagaacctgcatttaacaattcggcgatttgttttgcttttttaacgccttcttgtcctttaaatccacccgagatttctacgctatcagaattgattggttgatcaacacttgctgcagaaataaatttagggtttttcttttgtgcttcttttttatagctgtcaccttttttgaaatctaaccaaacaaccatgacattatcacgtttcttagagatttcttccgttacttttttaaatttgtttttgtcttttactttaaaagtaactgtaggctggtttgtttcctgtttaaattcttgtttggcagatccctgtttaatatcagaaccgcttaattttactttatcttctgcatcgcgaattgttaaattagcttgagaagataaaattttacgtgcttcattctggtctgttacaccagcaagttgtactctaattctattaggttcttcaacttgaattttaggttccgaaacacctaaaacgttaacacgattttctaatgtttgcgctgttgattgtaaggcttttttatctattttgtcgcctttatttaaaggatcgacttgataaagcacctcaaatccaccttgcaaatcaagtcctaaattgacattctttataacacttttataagttgcagccattccggcaaacaacaatacgactaaaagcaagaacgcaattattctactacttttcttcacatgaacacctcattatttacgtatgtatttagaatacttgaatactattttataacgcaagttaaatctttcttacaaaatttattagccttatacatattaacatactagagcagggagtaaaaatagtcatagatatatttaatttaaatttaacaattattatgtatcacaatttctttttttggaataaaaacaagctattctacatactacttataacttaaaaaggatgaaacgctattcgtttcatcctttttaataccacttctcattatgaagggtcaacttgtttaatagcaggtttttcgaaagttaattcagtaccatgaccattaactgtaataacaacagttgtttcatctactgctttaacagtacctttaataccaccaatagttgtaattctttgaccagattgaatgttattaatcaactcacgatgctgtttcgcacgtttttgttgtggtctgatcatcaagaaatacataaccgcaaaaattacgactatatatattagtaatgaaaattgcattttatacgctcctcttgcttaaaagttttttgggttctcaacatttaatccatattgctcgaagaattcttctttgaaatctaaaagacgatcttctcgaatggcttgtcttatatcttccattaattttagcagaaaatgtaaattatgaatagtagtaagacgaataccaaaagtttcctctgccttgattaaatgacgtatatacgctcttgaatagttttgacatgtataacagtcacaattctcatctaacggtcttaaatcatctgcaaattttgcatttttaataactaaacgaccttgcgatgtcatacaagtaccatttctggcaatacgtgtcggtaagacacaatcaaacatatccatgccgcgaatactacattcgattaacgcatctggagatcctacacccattaaatatcttggtttatctttaggcataaactgctctgtatgttcaaccattttatacataaccggtttaggttcaccaactgacaaaccgccgattgcataaccaggaaaatctaattctactaaatcctttgcactttgttctcttaaatcttcatattcgccaccttgtataatgccgaacaatgcttgatcttcaggtctttggtgtgcatctagacatcttttcgcccaacgtgttgtacgttcaatagatttttttacataatcatattcagcaggcatcggtggacattcatcaaatgccatcataatatcagatcctaaatcattttgaatttgcattgatttctcaggactcaaaaataatttagacccattagtatgatgtctaaattccacgccttcttctgtaattttacgtaaattacttaaactaaacacttggaaaccgcctgaatctgtaagaatcggaccatcccaattcatgaatttatgtaatcccccagcgtgtttgataatatcatttccgggttgtaaccacaaatgatatgtgttgcccaaaatgatttttgcttcaatttgtcttaactcttctggactcattgttttaacggttgctttagtaccaactggcataaacataggtgtttcaaatgaaccgtgtggtgtgtgcacgatacctaaacgcgcacctgattgtttacaagttttaatgtgttcgtatgttactgcaggcatattcaaaatcctcacattctttttatataattaacattgcatcgccaaaactaaagaatctatattctaaatttactgctgttttataagcattcagaacattttcacgagtactaaacgctgatactagcataactaatgttgattttggtaaatgaaaattagtaatctggccatcaattgctttaaaatcaaatcctggataaataaatatattagtccagccactcgtttcaacaaatttatcatgatcgcgtcgaattgtttcaagtgtacgtgttgaagttgtaccaactgatataatgcgatgtcctttggacttagtatcatttaataaatcagctgtttcttgtgtcatttgataatattcactatgcatttcgtggtcattcacatcatcgacgctcaccggtctaaacgtacctaacccaacatgtaatgtaacaaatgcgatattaacgcctttatttttaatttcagttaataactcatcagtaaaatgtaatcctgctgttggtgctgccgctgaaccactttctttagcgtaaactgtttgataacgatctggatcatctaaacgttctttgatgtatggtggcagtggcatttcccctaattcatctaatctttcttgtaaaataccttcataatgtaaacgcatgatgcgtccaccttgatccatttcttttatgcactcagctataattttgccattaccaaaattcaatttattaccaactttaatacgcttagctggtttcagtaagacttcccaatcattaccttcaatttgagttaacattaacatttcaacttttgcaccagtttcttcttttaaaccaaaaagtctagctggcattactcgcgtatcgttaagcactaatgtatcaccaggtctaaaatactcaatgatatctttgaaatgtaaatgtttcatttcaccagtttctctatccatgactaataaacgactatgatcacgatcttttaaaggcgtttgagcaattaatgattctggtaagtcatagtcaaattcttcaatattcacgttatcctctctcctcattcgactttgcaaaatgttcataagctaatggtgttgcttttctgccacgtggcgtacgttctaaaaagcctttctgaataagaaatggctcataaacgtcctcaattgtaatacgttcttcaccaattgttacggcaatcgtatctaaaccaacaggtccaccattatactgcttaataatacagttcatcattttatgatcaatgtaatctagtccgtgttgatcaacttgaagtaaacctaatgcgtgcttcgttgtttcaatgtatatttgttcatcttcattcacttgctggaagtctcttacccgcttcaatagtcgatttgctactcttggagtccctctagaacgtttagcaagttcaatggcactttcttcatcaatacctgtgcctaaaacctcagctgttctaataatgatttcttttaaatctgattcattataatattctaatcttaagtgcacaccaaatcgatcccttagtggacctgttaagctgccagctcgcgttgttgcacctaccaaagtgaatggaggtaagtcgatacggatacttctagcctcatcgcctttaccaatgataatatctaaaaagaaatcttccattgcagggtataacacttcttcaacaacactactcagtctgtgtatttcatcaataaacaatacatctccaggttgaagtcctgataaaattgcagccaaatcaccaggtctttctaatgaaggccctgatactgtacgtatattaacttccatttcattggcaatgatattagataatgttgtcttacctaatccaggggggccaaaaagcaatacatgatctaatggttcatgacgaagtttagccgctttaataaatacttctaaattactttttattgaattttgaccaatatattgtcgtaatctcgtaggtctaagcgacaattcgaaatcagtttcttcactatgcattgattgatcaaccatacgctcattcatgacaacacttcccctattaatctatttaaaattaagatacaactaattgaagacctgccttaacagcttcatcaactgagtcatatttatttttatttaacgttttctcaacttttgcaagctctcgtttagaataacctaatgcttctaacgctaacattgcttcttgcacgaattgatcttgcaccgtcgaagtagcgtctacttgtaataatgaatcgctatcttcttcagtgattttcactttaccttttaaatctaagacaatctgtcttgccgttttcttaccaattcctgggaatttagttaaatacgtatcattttcattttcaatggcacgttttacttcattaggcgtacttgtcgctaaaatagctaaagctgatttcggaccaataccagtaactttaattaaactcaagaacatatctttctcttcttcactactaaatccatacaataattgtgcatcttcacgaacaattaaagatgtacgaattaaaacttcatgatctagatgcttttgaaaacgataagaatttggtgtttgaatttcataaccaacaccagcagtttcaacaactacgtgtgtaggatataaatgtgttaacttacctttgacatacgcgtacattataggcacatccttacatactcatactaattaattctacttttgatacataatctaaatttctcaaagcaccaataacatcttctactgaagtttctttagatttagcattcagtgataatgttattgttgctttttcttccattggaatactttgatgaatcgttaatacagatagttctaactttgatataacatctagtacacgtgccaacatacccacaatatcagttacatataaaattaatgtaaattctcgatggtcaagcattttatcgtctactggaaatatcgtttctctatatttataaaaagcacttctagatagatcaaactgtttaacggcatcataaatggacaatgtcggatcactttttaaggcatctttaatcttcaatgttttaaccacggattcaggcaagacatcttctctaattaaataaaactttttataatctttattgtccatcatgttacgctcctattcaacgaattcaaattctccgccaagaattctaacgatatcaccatttttacaaccacgttctctaagtgcatcatcaatacccatcgaacgcatttgacgagcaaatcgacgtactgctggatcactgttaaagtcagtcattttaaacattctttcaatagcattaccacttaccacataagcaccatcatcatctcttgaaattgtaaatttatcttgtgacggtgtatgtttatataatactcggttaatgccaactgactcctcttcttcaactgtgaagtcaacatctttatattcttctaatttatctgctattgcatataataattgatcaatattatcacgcgttattgttgaaactggaataactggcacatcttcgccaatttcttctttaaacaagtttaaattatcttgtgattcaggtaaatccatcttgttagctactacgatttgaggtctatcttctaaacgttgctcgtacgcagctaattcttgattaatgactttataatcttcaataggttctctaccttcagaaccgctcatatcaatcatgtgaacaataacttttgttctctctacatgtcttaaaaattgatgtcctaatccaacgccatcagatgcaccttcaattaaacctggtaaatctgccataacaaaactacgttgatcaggcgttgaaacaacacctagatttggtttaatcgttgtaaaatgatatgccccaattttaggcttagcttttgaaacgatagataataaagtcgatttacccacactagggaaacctactaatcctacatcagctaataatttcaattctaaagatacatctaattcctcacctggttcacctttttcactgaagtcaggtgcagggtttctaggtgttgcaaaacgtgaattacctcggccacctcgaccgcccttcgctactacagctctttgaccatcttcaacaagatctgctaacacttcgtctgtttcaacatttttaataattgtaccaggtggaacttttaatactaaatcttccgcatttttaccatgcatattactactttggccattttcacctttgcttgctttaaaatgacgttgatatctaaaatctaataacgttcttaaaccttcatccacttcaaatacgactgaagcacctttaccaccgtcaccgccagctggtccaccaaatggtacatatttttctcttctatatgcggtaataccattaccaccatcaccggctttaagagatattttgacttgatcgacaaacatatatctcacctcttttacatataattttcattttcccaataattatagcatattagagccccttatatattgtaaataattaggggctcttatgcagttgcttttaaatttactttactcaaattgctgatatttccgagtaccaaatatgatactttttttgctttttatactgcaactgtattcttttgtccccttatagtttagcgattaggggctcttatgcagttgcttttaaatttactttactcaaattgctgatatttccgaataccaaatatgatactttttttgctttttatactgcaactgtattcttttgtccccttatagtttagcgattaggggctcttatgcagttgtacatttagtataacgtctaaaattcccattttttaataacataattaaaataataatgaaaaaccttttataaaaagtaaaaaacaccagaagattcacttctggtgttaactagacaaaattattcagctactgcatatacagaaacttgttttttgtcgcgacctttacgttcgaatttaacaacgccgtcgattttagcgaataatgtatcatcgccaccacgacctacattttcaccagggtaaattttagtaccacgttggcgatataaaattgaaccacctgttacgaattgaccgtcagcacgtttagcacctaagcgttttgattcagagtcacgtccgttttttgtagaacttaccccttttttagatgcgaagaattgtaagtttaattttaacatcggaatgcacctcacttataatttaatctaatattctcattatattcttcttcaatagtttgtaaagacacaagcattgtttgaagaattagttgcgcttcatcgttatttgtatcaacgcttcttatatgaaaatgaccaccattgtcgtcataattgatatctggtctctcagatgtcaatcctataatcgcattaacactaccaaacaatacagctgaagctccagcacaaacgatatcatgaccatattcaccatggtcagcatggccatccataataacgtctgttactttgccttcatcattaactgtaatatcaacagtaatcataataattacgcgttgattttatcgattgttaatttagtgtatggttgacgatggccttttttacgttttgaatttttacgacgtttgtatgtgaatacagtgatttttttaccgcgaccttgtttattaacagtagcagtaactgttgcaccttcaactgttggcgctccaactttaactgaatctccacctacaaataatactttatcaaatgtaaaagtatctccttcgtttacgtctaatttttcaacgaagatttcttgaccttcttctactttgatttgttttccacctgtttcaataatagcaaacatactttgcacctcctgtataataagtcacgccatacataggtgacatttcgttattgagtcaagcgtttgcactctacgttgtttcggtcgcaactcgagtcatttataaacataaactcttctcgtttcttccttcaacgccttgattgacaatcgctttctttcaataacttctgcaaatgagtcaagcgtttgcactctacgttgtttcggtcgcaactcgagtcatttataaacataaactcttctcatttcttccttcaacgccttgattgacaatcgctttcttcattaaaaatgttcttgaacctatatttgagcggttgtatgtagctacttataactactcaactattgcatcttaccattgacgacgtttcatgtcaatgtcattgtttgtttttttaaggaactttataatcaacggataaagcataatcaacagtacaaaattcataattaatgttggcaataatctaaagactacaaaatgaataatatcaaattgaatgaatcctaacataccgtatattaatgccacatagacttctaataataaggtgctggctaatataataatgaataacatcgaatgatctttgtaaaaaattttaaagaatcgatctataagtgctaaaaacaatatatagccaaataagtacactccataaatactaccaaagtatacatcagtcattacgcctaaaaatatgctgagcaataatgatacgccaaagccacgatacactaccatcattaaaatatacataaatgtaaggtgtggtacaaatacaagttcaaacttacctatatgcattggaataagaagcccaattgcagtatctatataaaatagtaaaatacctatcaaaaaataatacagtgtacgcattatttatccctgctttcatcatcaggaattgttttaggatctctttttgcaacataaacatgactcaaatctgttaagtctgcaccagtcttaaccctaacttctttagctaagccgtattgatcattttgaaccttagtcacttctcctatatataaattacttggtagttgatcagctaatccacttgtaacgactttatcaccttttgagatattatctctattattaatgtcactaattacaagttctgagttcttttcatcataacgatcaattaaaccaaatatatttttagaaccgtgttgtatatttacagataatttacccgcacgtgtattagttgagattaaatcaacttgtgaagaaaatttattaactttagtaactcttccaacaaaaccttgtgatgtcatcacagccatatttgaagttatacctgatttagatcccttatcaattacaattgtattcatccactgatccggatttcttgctaaaaccgtagtagaaataggatcaaattttgaaatatcttttaaatcaagctctttttttaatttttcattttccgcttctaattgttggttcttagattctaactggctaatcttatttttagattctttagaatctccttttttaaaaaagtccccaatcgtaccagcaacaaaattaactggataactcacaactcgttgtccaaaagacacagaatcacctatatattgttcaggaggtgattgagattgtgaacgtatggacagcccaattaatgcaataaaaacgataattgcacataaaacaacaattaatttgttatttttaaaaaacttaagcacccagaacacctctattatgtcaaaatattgtatatccttttctattttatattactcccattatgaaataaagcactaactacgaattactttgaaaatgaacaactccgtaaaaaatttgtggcattttaaaaacaaaaaactactagcaaacattccagtcactagtagtttaaataatcgatttaaattttaaaattatttgtttgtatcgttcgaggattcactgttcgaattctgaagttgtctccaacgtgcgaataagttctgggccttttgttgttcattagcttgtttctgttttgattgttctgccatttgaactacaccaaccttttaaatttattctagtgacaggataactaaaatatatttcttatgcaataatttcctattgataagcattttcgggttttagttgtaaattttgccctaattcatttaagtcttgttgcatttcaaattcagtattgtaaacacgcattgactcatctccaaatttataaagaataaattcgtctcctctttgacctataatatattgatcattataagccatgcgattcattccagacacagccataaactcttgtttatctatcattttaaatacatttttaatttggcttaatggtacattctttattaaatcattttcttttaatgaatatttctcaccacttacataaacatgttgggcatcattagtgggttgcgtaacttgattcatttgatcattatcgtgatttacaggattccaatcttgttcttttaaaaaaggtgcgtatttcaaggcgatataaacaattatcacaattgctattactgctataatgtttttaatcatactaaatatcaatctcatagttcgcctccaatgtcttcatctaattatatattttattatgtatattttcctcagtcttcagccttaatcatgatatatcttaggactgatgcacgttcatttaaaatagcttataattttgttatgatttaaaagcgtatgaggaggtttgtagcattgagtatactaacaattattttaatagcactattagtcatcctcctttttagagttggactttctattttgcgatttttaatttatgtcggacttgttttattatgtatttacttaggatatcaaggtttaatttggttgctcgatttttttcaaataaatagtgggtttttaccgcactttcaatttaacaattaaatttattctgcataacaaaactcctaatgtactagtttagaattttttaactagttccacattaggagttttaatttggtttcaagcacggatactacttgatgaacagattactattacttacgcccaaatgcgttagataaaaatcgtatcagcgcgtagctaccacttagtaaaaggccccaaacgattccagtaaaaattgagccgattgctacacttaataaaggaaaagcttgtttcgtaacgatcacacctgctaacgccgttactaaaatacctaacgtagataaagctaatgttattaatagattgcgctttgttacaggttcatttttaatatttaactgcatggtataaaccattggcacgagaaccccgataataataaatagagtcactatttttcctccaatgaaagtacttcgtaggtattatacacaagatacgtcattaattctatcaacttcaatcattttcatcaaagtaacccgcttctacaagactggtaaatctattatcaccgattataatatgatccaataaatctatccctaaaatcaaaccacactccttcaacctcattgttgttatgatatcttcttgtgagggcgttacatcaccggatggatgattatgaactgcgatgattgcattggcattttctctcaccgcaatactaaaaatttcacgtggatgtacaatcgaactatttaatgtacctttaaaaacacaggtttctttaatcactacattttttgaatttaacaataaaatgacaaaatgttcttgtgttaaatctttcattgttggaatcatataatcagcaacatcacttggttgcgttatttttatacgattattttcagctcttctccccatcctttcccctaactcaaatgctgcttttaaagtaattgctttttgtaatccaatccctttaacttttatcaaatcgttaattgaagattttttcaattcattcagattcgaagcagatttaagcagttcattactaatgtctatgctcgagaatccttttcttccggtgttaattaatatagctaataattctgtattcgaaagactttttgcaccatggcttaacaaacgttctcttggcatttctgaagttaccatttctttaattttcaaaaatatacgcctcctaaaaattgatggatatcattataaaaaagtgaattgataaaaaaggaaataaatataaatggaacaaggggtaatagtttaatcggcttaaatatcatggtaattaaagcaactaaaccagcaatgacaaatgtaaataaaatgacataaatagtgaattggagagggaaaaacaaagaaagtgcagatattagtaaaacgtcaccataaccaatatatgcccgaaataaaaagtagaatatatgcgtggtcatactaataatgataaaagctactggataaatcatacttaacgagagagaaacgatacaataaattataattaagcgacaatctaacattaaagaagtgatatcggtcatagtaaaaataagcagaaaaacatatgtagttataaatagcgtagcatttacgtatgtgaaatcatacttaataaagacgataggtattaaagcaaaggtttcccctaagaaatgtgttagggaaatacgctttcgacagtttcgacatcgcccttttaataataaaaaactaataatcggcattaattcataccatttgagtgacgaattacaataatcacatttcgatcttctatgtaaataatcaaatgacgtttcttctatagatataaattgatatagaaaactaaaaatacaactgcaactataagataacaatactaccaaatgacaacctccttatgtaaattatagttagttattaccaaaatgtaaatatacactatttttcaagaattgaaccgctttttcatttaaatttttcaatattgctaagcataattgatggatactttaacaacccattactgctcggcaaaattaataatggcaagaaattgaaccttataaacacatacgatttagagcataaaaaataaccatgaagctctacctattgattaaatagattcttcatggctattttagttttagttttataatgcttcaaagtctaattttgatttaacttcacttatgaaatacagactaccggtaattactaatgtatcaccttgataattttttataaattcaacgtagtcatctactaattgtatttcatcattttcaatactacctacaatttcttctttgcgtaacgctttcggaaaatcaaattcagttgcataaaacgtatgcgcaattaaacttaaatgtttgaccatctcgttaatcggttttccgtttattgctgagaacaaaatatctactttttctttatcatggtactgtttaattgtatcaattagagcatctatactctctgaattatgtgcgccatccaaaatgattaaaggtttgtcatgcacctgctcaatacgtccagtccaacgaactgattcaataccgtctatcatcttattgaaatctaattcaattaatccttgttcatttaattcaataagagctgttatggctaatgcagcattttgtttctgatgttcacctaacatgcttaaaatgattgtttctaattcataatctttataacggtaagtaaattcatcattttgcgatacaacaacaatttctctatctaattcaattggctttgcatgttgttcaattgcgcgttcacgaacatattttaatgcatcttcatttttaacagcatatatcactggaacgttaggctttataatcgcgcctttatccctagcaatatctagataagtaccacctaaaatatctgtatggtctagaccgatactagttaagattgataaaaccggtgtaaagacatttgtcgaatcgttctttatacccaatccagcctcaacaatgacaaaatcaacaggatgtatttcaccaaaatataaaaacatcatcgctgtgattatttcgaattcagttgcaacacctaaatctgtttcacgttccatcatttcacttactggtttaatacgtgatactaattctacaatagcgtcatttgatattggcacaccatttagaccaattcgttcattaaatgtttcaataaacggcgacgtaaatgtacctacttcataaccattttcaactaaagctgttctaaggtaagcaactgtagagcctttaccatttgtgccacctacatgaatacccttaatgttattttgaggattattaaattgtgctagcatccattccatacgtttaacacctggtttgatgccaaatttagttctttcgtgtatccaatacaagctctctaggtaattcattgttactaactcctatgcttttaattgttcaattcttgccttcacaccatcatatttttcttgataatcttgttttttacgtttttcttcatttataaccttttcaggtgctttacttacaaagttttcattagagagctttttatctactctatctaattcgctttgaagtttagctaattctttttccaaacggctgatttccttatccatatcaattagcccttctaatggtaataccactttacctgcaattacaactgatgtcattgctttctcaggaatttccacgtcagtgctaatatttaaggtactaggattacagaatttgattaaataatctttgttttgtgataaagttgtttcaatttctttatctttagcttgaattaaaataggtatttctttagacaatggcgtatttacttctacacgtgattgtcttacagatttaatgatttcaacaagttgttgcattgtttgtttactttcttcaaaaatcaatgattcacgcacttctggccatgaagctttaacaattgtgtcaccttcatgtggtaaactttgccatattttctctgttacaaatggcatgaatggatgtagcattctcataatattgtctaaagtataactcaatactgaacgtgtaacttgtttttgttcttcatcattactattcattggaattttactcatttcaatgtaccaatcacagaaatcatcccaaatgaaattatataatgcacgtccaacttcgccgaattcatatttgtcacttaaatcagtaactgttgcaatcgtttcatttaaacgtgttagaatccatttatctgctaatgataagttaccacttaaatcgatatcttcaactttaaagtcttcaccgatattcattaaactgaaacgtgccccattccagattttattgataaagttccacactgactcaactttttcagttgagtatcttaaatcatgtcctggagatgaacctgttgctaagaagtaacgcaagctatcagcaccgtattcgtcaataacatccattggatccacaccattacctaatgatttactcatcttacgcccgtcttcagcacgaactaaaccgtgtaataatacatcattaaatggacgacgatctgtaaattctaagccttggaatatcatgcgtgctacccagaaaaagataatatcgtaacctgtaactaaggcatttgttgggtagtatcgtttaaagtcttcactttctaaatcaggccaacctaacgtagagaaaggccataaagcacttgagaaccacgtatctaatacatcttcatcttgttgccaattttcaatatcagttggcgcttcttctccaacatatatttcgcctgtttctttatgataccaagccggaatttgatgaccccaccataattgtcttgaaatcgtccaatctctaatattttccatccattggttaaatgtatgttcgaaacgttgcggataaaaatcaatacgatcatctgttttttggttatctaatgaacgtttcgctaagtcttccatgcgcacaaaccattgtgttgataaatatggttcaacaacagcgccagatcgttctgaatgacctacagaatgaacatgatcttcaatcttgataactaaatcttgttcttttaaatctttaactagctgtttacgacaatcaaaacggtccataccttcatatttacccgctttgtcgttcattttaccattttcatccataacgataatattttctaattgatgtctttgaccaatttcaaaatcattagggtcatgtgctggtgtcactttcatagcaccagaaccgaagtctatatcaacatactcatctgctaaaataggcagttcgcgtcctacgattggtaatataacagttttaccgattacatctttgtatcgttcgtcattagggttaacaacaatcgctgtatcacctaacatcgtttctggtcttgttgttgcaatttcaataaaaccttcaccatcagcgtaaggatatttaaaatgataaaacgcaccttgaacatcttcatgtattacttcaatatcagataaagctgtacgtgctttaggatcccaatttataatacgttcgccacgataaataattcctttattgtataaatcaacaaaaacttttttaactgctttacttaaaccttcatctaaagtaaaacgttctctactataatctaaacctagacctaatttagcccattgcgcacgaataaatgacgcatactcttctttccaatcccatgcctgttctaaaaacttttcacgaccaagatcatatctagttattccttgttcatttaatttagcttctacctttgcctgtgtcgcaataccagcatgatccatacctggtaagtataacgtatcgtatccttgcatacgtttcatacgtgtaatgatatcttgtaaagtcgtatcccatgcatgtcctaaatgtaatttaccagttacatttggtggcgggataacaattgtatatgtttcttttgatttatcttctgacggtttaaaataaccattctttacccattcttcataacgtcccgcttcaacttcacgaggatcatattttggtttcatttccatttgctatacctcctaaaaaaataaaaatatccatcctatatacaaataggacggatattccgtggtaccacctatattcaagaaggatgtttaatatcaaattcactcttttaacataattggaataatcataccaatactatcatcgtgaaatttgaaatgcttcatctcttcaagcactctagattatgattaacgctcaaacacgtcttagcctactattaatcacgttcagctaagatactctgtgggctaccttcagtaaaaatcatttacatactcacaccaaatcatatgctctctttaaaataatttgaacttactcttcccaaatcctatattaaactcttaacttatagtataatgattgacaaaataagtcaatgtataggtgggaataaaatgaatgaatgcgcatttggtactaaagatccagtctacttaaactatcatgatcatgtatggggacaaccgctctatgatagcaaggcattgtttaaacttttagcattagaatcacaacatgctgggctatcttggttaactattttaaaaaagaaagaagcctatgaagaagcattttatgatttcgaaccagaaaaggtagcacaaatgaccgctcaagatatcgaccgcttaatgacttttccaaatatcgttcatcatcgtaaaaaattagaagcaattgttaatcaagctcaagggtatttaaaaattgaacaagcatatggtagttttagtaaatttttatggtcttatgtaaatggtaagcctaaagatttgcagtatgaacatgcttctgatcgtatcacagttgatgatactgcaacacaactatctaaagatttaaaacaatacgggtttaaatttttaggtccagtaacagtattttcgtttttagaagcagctggtttatatgatgcacatttaaaagattgtccatcaaagcctaaacacaattaatttgctatagcatcataaagtaaacgagacatcatctatttttaactaatagactgtctcgttttttgatgtgaaaatttattcaaatcataagttaaagttccaagttaatgcactgctaatattagatatcttaatctaaaaatagatgtacaacctttgcttaaaccttaataatgaattctatcctaagcataaatcaacttaaatggatgatagtttctaatcttcacgcttattcgaacgatattttaaaaagtaattaattcctggtgcaataataaataggatgaaaaagattcggaaaatatgataactcgtaatcatagcaacatcggcaccagtagctaatgcaactaaaactatctgattaacccctcctggtgctgcaccaagaaacaattcattaataggattattatcaaagaaatgtatgacataaaccatgattagcgcaccaattatcaacataatattttgaattgtaattgcgattgctagtctaccttttaaatctgacaataaatgcgcaatttgaactccaattctaatcatatatattagttgtgccatgttcaacaaccaatgatctagtgtaaatgttaaacctgtagaaaaattccaaacaattaatacaatgagtggtgctaataattgaaatgttggaaactttattttagacataattagataaactataaagatagctatcgctaaaataactatttgccctatgtttaatacttgtgataaaggcaagacttttgttaactttccattcgcatgcatgttaccatcatgaaaaaaatatgaaatgaacggtactaaaacaacaacaaatataattcgtgatgtttgcgttaagctaacaactaacaaattagcacgtttgtcttgttcagccatgaccagcatttgtgttagtgctcctggtataacacttaaaatagctgtttctgtattaatacgtgcaatttttttaaaaataaatgccattactattgcaattaataatatcgaaatagatacaacaataatcgaaagccaattgtctttaatatccataacgacatttttcgtaaacgttgatccgatttgcacacctaatagtacaatacctaattcactaagtaagaatggccatttaatatcaagtttgaaaacttttacacaaatgattgatgcgataataggaccaaacataaatgggagtaatacgtgcgatgaatacagtagaatactaataaaaaatgataaaacgaacacaatgaaattatttctatatatcattgtcatgttttccacttctttcaataaaaaataaaatgactaaattgctgcttgagcttcacgtttgttaagataacaatatccgctagcagttttgactacaaagcatatatggactttcactatcaagtcgccgcccatgcctgatatacatttaaaaagagcctgaacaaagttcaggctctcaatttgtccgtatatttattttacaatacgacttaaagccgtatcaaatgcttgaatcgttttttcaatatcttctttcgtgtgtgccgtagataggaatgtaccttcaaattgagatggtggtaaaaacacaccttcttttgccatttctcgatacatttctgcaaataatttcaaatcacttttattcgcttgttcaaaattagttacaggtccttcatttaagaaataaccaatcattgaacctgctctatttacagttattggtacattgtgtttagcaaatacacgctttaaaccgtcttcaagtatatcgcctaacatattaaaatactcatatgtctctggcgttaattggcttaacgtttcataaccacttgtcattgcaagaggatttcctgataacgtacccgcttgataaatatttcctaatggtgctatatgatccatgatttcttttttaccaccaaaagcacctacaggtagtcctccaccgataacttttcctaagcaagttaaatctggtgtcacaccaaagtaaccttgtgcacaatgataaccgactctgaaaccagtcattacttcatcgaaaattagcaatgcgccgtattcagtcgtaatatttcttaatccctgtaaaaaaccttcaatcggcggtacgacacccatattaccagcaacaggttctacgattacaccagcaatatcgtctccaaatttttcgaaagcgattttaagtgcatctaaatcattgtatggaactgtaattgtatttttagcaataccttcaggcacaccaggagaatccggcaatcctaatgttgccaccccagaaccagctttgattaataacgaatcactatgaccatgatagcaaccttcaaatttcacaattttatttcttccagtataaccacgtgctaatcttaaagtatccaatgtagcttctgtaccagatgacaccatacgcactttttctattgaaggtactcggtcaataacgagctgcgccaatttattttcaagtaatgttgatgcaccaaaacttgtacctttatcaattgcttcatgtaaatgactaataacttgagggtctctatgtcctaaaataagtggcccccaacttagtacatagtcgatatactcgttaccatcgatatcataaatttttgaacctttaccgtgatccataaaaattgctggtgtatctactgatttaaatgcgcgtactggactatttacaccaccaggcattaaagtttcagcaaccttcattgcttcttctgatttcgtatatctcataaagtaaattcctcctatagtttatggaaaatcatacatataaaaccttatttatctaaatagcgacaaatgtcctttgcaaaatacgtaataatcatatcagcacctgcacgtttcattgaaaccatttgttccataacgacacgttcttcatctatccaaccattttgtgccgctgctttagtcatactatattctccactcacattatatgcaacaactggaacattcgtatgatttttaacatctcgaactatgtctaaataacttagagcaggtttaacaatcatcatgtcgcacccttctttaagatcactttctaattcacgaagtgcttccaaacggttagcagggtccatctgatacgtttttctatccccaaatgatggcgctgaatctgctgcatctctaaaaggtccaaagaaacttgatgcatacttgacaccataactcattataggaatattgtaatagccggcttcatctaatccacgacgaatttcagcaacaaaaccatccatcatattacttggcgcaataatatcagcaccagcttccacttgagaaattgctgttttaacaagcagtggcaatgatttatcattgtcaacgtcatgtgtatggtcatcaatcacgccacaatgaccatgatcagtatattcacataaacaagtgtctgcaacaattaataagtcatcatacatttttttagcaatacgtgttgcctgttgaataacaccatcgtgaatgtatgcaccagtacctatatcatcttttgagtttggaacaccgaaaaacataatggcacgtatgcctaagtcataagcttcttttaattcactttcaagtaaattcaaactgatttggtatacacctggcaatgacttaatttcttttttcacatcgtctttttcaactacaaaaattggatatattaaatcttcttttcttacatgattctctctaaccatatctctcattgtcgctgatgatctcaatcttctatgtctatcaaatttcatttttagcccctactttctaaaatcttttcaattagtgattcgagtgtttgaatttctgcaattgttactggttgttgatatgatttaatggtccgtgctgtttgttctccaatagcaaaatacgacttgaattttggtacaaatccttcattaaaataataacgtactgccgacgaacttgaaaatgttaatgcatcgatttgttgatgttctatcatttctttaacatcttgtatattttgtttgttaggcactgaagtatataaatctattttaacaacttcattatctttagataacgctgctaataacaatggtctcgccaattcactcgaaggcaaaagtattttttggttagtttgattaaatgattttaaaaatccttcttgagaaaagtcgtttggcataaaatcaactcgaatgccaagtgattcacaatattgcgctgtcttacttcctatcacagcaatgttatcaacattaattccttttagatatttataaaagaatttcacagcatttttagatgaaaaaataagccagtcatagcgttgatttaacaaatgaatatcaaaatttagtggctttatatcaataaagggtttgtgaataattgatactaaatcactttgcatgtcatttgtttgtgtcataactacaactggcttcatatttaaacgtcactccattatttaatgttgttcatttaagcgttttataatttcataagcaccttgctcttttaatttgttactcactgttttgcctaactcaaccggatctgttccgttcattgtatattcaaatcgttctttaccatctggggtcataattaaacctgtaaattcgatttctttttgatctgagattgtagcatatcctgcgattggcacctgacaactaccatccatttctgctaaaaacgttcgttcagcagtcacacattttgcaacctcatcattatgtactttgcttaataatgttaatagttcttcatcgtcactacgacattctatccctaaagcaccttgtccgattgcaggtaacaatgtatctctatcaagataagatgttacaatatcatctgaccagcccattcttcttaaaccagctgcagctaaaataatcgcatcataatcttcagtttgtaacttttctaatcgtgtatctatattacctctaatccatttaatctctaaattaggatacttagataatatttgtgcaccacgacgtaatgaactagtaccaataatactgccttctggcaattgggatagtggtgtatgtgttttagaaatatacgcatcaaaaggtaattctctatcagggatacaacctaatgttaaaccttccggaattacacttggtacatctttaagcgagtgtattgccatatcgatatttttttcaaaaagttcatgttgtatttctttaacaaataagcctttgcctccgactttagacaattgcttatctactatacgatcgcctttcgtgacaatttctttaatttcaatttctagatttggctcgacagcttttaatttatcaataaattgctggctttgtgttaaagctaatttacttcttctggagccaacgactaatttacgcatgttcaattcctcctaggaacggattgctctagattattttctcaattcacaaaatgtgttgcaaaaaataaattaatcatatttaagcaaaataaaataatgttatagtatattaaataccttgaattcaaccatttgttgattctaagcaaaatataacttccatataatactgtaataattgaagagagtattaccttcgggtcaatgaatatacgttcaccaactgaaattacaccccactgtgtacctaaaataatactaaatatgagaattatccacccacttaacgttgagtaaaacacaattgattcaagtgtagcaacgctacctattctaaagtatttttgatcaaaacgtttttccttcaaattacggtattgcatgatatacagtaatgcattgacaaaagctaaggcaaagaagacataacttaacacagctagaccgatatggactaacagtaactcgtctacaacagcaattttctgaaccttattagtataatgtgtcggttgaaatgtattcatccctaaaagtgttagccctattaaattcaagaaaaacacagagaaattcaaaactttgataaggttaagaattaaagagattgaaataatcaaccaacttaaagtatagaatacatctgaaatagaccctaatggaatatgtctagtttgtataataaaaatagataaagagattgtttgtaaaacccaaacaatccccaataaatatatgcctaaacttctaatcttatgacttttttggacaaaatcataaaaatagcaaatgatactgattaagtatattaataatataatttcattgaatcgaataaacaggttttcttgcatattatcaccatattaatatgcttattcaaaactaaagatacgtcgcgctgaaatttccttgaccttgctttctttttgttgcttcgcttgctcatgaggacattcagcttcgatatcaaatatattttgaaatagctctaatttttcattacttttcttatcactacttaattctttggcctgtttaataggatctttcaacatttgattgatgatactttttgtatgtttagatataattttacgctctctttcgcttaaccctggcaatttacgatcaatactgtccatcgtttctgcttgaattgccatagctttttcacgtaaagctctaatcactggaacaacacccaacatactaatccactcattgtgtgcatgtatttctgcaggaatttgttccgaaattgttgcagccgctaattgtcgctcacgtaagtttgcatcaactaaaccttttaagtcatcaacatcataattaaagatgtttgtgatggcactaataccaggttcaatatctcgaggaactgcaatatcaatcaatactagtgaatcttgctttctattttctgcaattctttctatcatttcatttgtaatgatataagattgtgcactcgttgaactaatcacaatatctgcactttcaagtaaatttggtaatgatgatagttcatcatatttcacttgatgctttgctgctaatttcatagcattttcaattgttctatttactactgtaatatcagtaattccagaaccaagaagatttaatagtgataattcactcatttcccctgcaccaataatgatagcttgcttacttttcaatttgccaaatacttttttcgccaactcgaccgcagcataagacacacttacagcattatcagctatatctgtttcattatgtgctctttttgcaaaagtaattgcctgtttaaatagatgattaaaaattgttcctgtcgtacctgtgctttgcgctaagaaaaatgcatctcttatttgacctaaaatttgagtttctccaagtacgattgaatctaaaccagaagtgacacgcaataaatgttctactgcttcgtcccccacttttacttctgacattgctttaatatcatctacttcaaatccaaatgcacgagctagaaatcgttgaatatagtaacgacctgtgtgaatttgatcaacaacagcatatacttcagttcgattacatgttgataatatgacattttctaaaatagatttagtttcatataaatcttcatgggcaattcgtaaggcatcatctctaaaagcaacttgctctcttagtgcaacatcagctgtgcgatgatttatactaattgcaataaaatgcatttgaaacgcccccatatatactaacaatacaaatattataacataatttaaaatccaattaagtacgatgcttaaataaattataatctttctaatttacttttgagtttttgacaaaatgatgaacgttgaaaaatgttatcaattgtgtactaattaaaagtttcgtgcttacattatttttaaaatttttgtataagttttgtcgtacaaaaactatgaaatatacggttcaattaaattccatatttgttgttgtttattattttgaattgatgaataacttacaattgtatcgtctgggtccatatctaattgtgtcttaatatttttaatatgcttttgaactttaccttttggaattttgtcttctttagtgcatataactaaagtaggaatatcaaaatgtttcaaataattgtacattaagatatcatcttgtgttggatcatgtcttaaatcaactaattgaataactaattgcaaattctctctcttagttatatattcctcaatcattttcccaaatttttcacgttgtgttttacttactttagcatatccataccctggaacatccacaaaaataagttgttcatctatattataaaaatttaacgtttgcgttttgccgggttgctgtgatgtacgtgccatattttttctgccaatcatactattgataaatgtagacttacctacattagatcgaccgctcagtgcaacttcagacaattctgtttctggatattgttcttcttttactgcactaatgattaattctatattattaggattaactttcattttatatcctcacttttttatattctctttcaactctaccattatataatatttgaacctttcggtatacattataaaaaagctccgatcaaagttaaactatttgagcgtcaactttgattggagcttttcacttttataacacatcaatgattaagctgatgttttactattattaattaaattgccttctgcgtcgtatagttctggttcagtttcttcattaattgtttgtgctgtaataactaccttcgttacattttcgttagaaggcacatcaaacataatatcgattaacgattcttctatgattgaacgtaaaccacgcgcacctgtttttctttcaattgctttttcactaattgctgataaagcttcttcagtgaactctaaatccacattatctaattccagcattttagtatattgtttcacaagtgcatttttaggttgcgttaagatgtttttcaacgcagttacatctaatgtttctaaattagctacaattggcacacgtccgataaattcaggaatcaaaccataggcttgcaaatcttctgggcgaatttgtgctaataatgcttgttcgtcatatttatcagcttcattgcttgagaaaccaataactttttcaccaagacggcgcttaatcacttcttcaataccatcaaaggcaccaccaagaataaataagatatttgttgtatcaatttgaatcatttcttggtttggatgtttgcgtccaccttgtggcggaacacttgcagtcgtaccttctaagattttaagcaatgcttgttgaacaccttcacctgaaacgtcacgtgttatagatgtgttttcagatttacgtgcaattttatcaatttcatctacataaataatacctttttcggctttatcaatgtcaaagtcagctgcttgaattaatctcaacaagatattttcaacatcatcgcctacataaccagcttcagttaaacttgtcgcatctgcaattgcaaatggtacattcaacgtcttggctaatgtttgagctaataatgttttaccactacctgttggcccaattaatgcaatgttacttttttgtaattcaacatcatcttcttttggtcctaattgttgaatacgcttatagtggttataaacagctacagctaaagattttttagctttttcttgaccaataacatattcgtttaaatgatccataatttctttaggagtaggtaattctgtcatcgcttcagaagtgttttgagctaattcttcttcgacgatttctgagcataattcaatacactcattacaaatatatacaccacttcctgctacaagtttttttacttgatcttggtcttttccgcagaaagagcatttcaaattttcttcatcttcattgaatttaaacattctttttacacccctattcgttaaagactatactagattggatattacaatgcaacatattaacatacaaactttttgcttaaagaatagtagcagatacataagctatgcatctgctactcatttttgtaatttaatatttaatgaggattaatcttctttagttccttcaacgaactttgcgttatctcttaataaatcgataactttttggatacgaacatcatttttaatgatatcagtattacctaaagtatttttgatatcttcaactgagatattaaattgtttactcattttttctaattctttatcgatatcttcatcagtagcttcgattttttcagcttcagcgatcgcagttaaagttaagttagttttaacacgttgttctgcatcgtctttcatttgctctcttaattgagtttcatcttgacctgagatttggaagtacgtttgtaaatctaaaccttgttgttgaattctttgtgcaaattcagacaccatacgatctaattcagtattaaccattgcttcaggaatatcgattgttgtattatcagtagcttttgtaatcgcttcttctttttcaacattttcagcatctgtagctttttgttcagctaaacgtttacgtaagttttctttgtactcgtctactgtatttgcttctgcatctaattcattagcaatttcatctgttaattctggaacttctttaaatttaatttcgttaacttttgttttgaaagttgcttctttaccagctaattcttcagcatggtattcttctgggaatgttacgacaacatctttttcttcgtcaactttcataccttctaattgctcttcgaaaccaggtatgaatgaacctgaaccgatttctaaatcgtaaccttcagcttgtccaccttcgaattcttctccgtcaactgaaccactaaagtcaatgttaactgtgtcgccattttcaacaacaccatcttctttaactaccatttcagctaaatgtcctaagctgtggtcaatcgcttcttgtaactcatcatcagataattcagtttcttgtttttcaatttcaagacctttatagtctcctaatttaacttctggctcaactgtaactgttgcttcaaaaatgaaatctttacctttttcaatttgagtaacacttacttctggttgtgcaactggtttaatatcagtttcgtcaattgcttcaccataagcatctggtaataaaatgtcgatagcatcttgatataatgcttctacaccaaagcgttgttcaaaaattggacgtggcactttacctttacggaatccaggtacgttaatttgtttaaccacttttttgaatgcttgatctaacgctttgtttactttttctgcaggaacagtaacagttaataaaccttcgttaccttcctttttttcccaagttgctgtcatgtatatatacctccatgattaactaatttattttttcaacttccctattatatcataggtctattccctatacaaacattgaaatcacaacgtttatatatttgtaaatcaacttttttcgtcaaaactatattaaaatgctgagtattattttgcaacaatttaactattattattcaaatctaattgctgaataaaattaaatgcatcgatactttgtaattcacatttaagtcctaacatatttttgaaataacattcgtatgcattaatccatttattcgtttcaaacaaagtttcaatatcaattggataaatcatgatagagtgattattcataatatggtgtgcttcttcagcgatatgtaatgcaccatcatttaatgtttccataacgttaggtataactttttctttcagtgttgtatgttctagcccatttaaattagctggtacaaaagttacatccataccatacttttcaattgtcagttcttgtgtacaatttgcaaaccttaaatactcaatcattaaactaatgaggttataactgtacgtattagattttaatatatataataccgtttcttgaaattgaaaatgaccattgtctattaacttcaaaatcaagtgcgtctgttccctcattgataacgtatcaaaatcagttaatgactgagtcaatcgtttttcatcttcaattaattttgacttagcaaattctttaagaggatgtaatgccattcttgttttgtgatctttgacttcatcaataatttgatgaattacttctaccgcttcaaaatattgtcccaaaccaatcaaacttttcacgtaataaatcatcaatgcatcatattgttgtatgccagttttcaataagacaattgtttcttctcttaattcaagaaatgaccccgtctcatataacatacggcatttcatcattgctatttcttcagtgagttcaaattgacgttcatattgcacaatatattcatacatcaggtcatagttttggtcttgttcagcacgttttatatctttatataactttttcgaagagttaggaaactgaataatatctgacatatatgtcacctcgtttgattataaatcttgaaggattaatgcgctccacgtttcgaaatcatcatatgactctatgttgcctttttcaacccattttattcgtaaagtatctgtttctttagcttctacatcattcgtacttacagtgattttaaatacaacaccaatatgtaccttgcccacttcattattatcgtcattaataaaaccgatatattccatattttgtgaatcttgctcacttaaacctacttcttcttctaattctctctgtgcattaactctcaatacttcgttaatagattctgctcctggaacatcattcatatgaccgcctacacctattgaagattgtccatgcaatcgagcttctccaccgccagataatcgttcatacactaatatctcgccatgctcattttcaagtaaacaataagaaatgagttgtttatatgatggatcctcttccatatcgccgcgtcgcttaacttcatattgacttagcgcatcaaaaatattttgaccttctggtttattcttatttaaaaacccattgaaattattcttttcattattaaaaataatttctctaggtactacaatgatttgttcatcaaatttagacatcgtataaaactcctcactttaatgtttgttctcttaaatgcattttagcaaatatgtcatattttagcgattaaatgtggcattttgctttttaaaaaataaaaaagagatgacaatgccatctcttttttataagtgttattattttaaagcatctttagctttagttactaattgagcaaatgctttttcgtcagaaattgcgatttctgataacattttacggttaatgtcgataccagcttttttcaaaccgttcattaaacgtgagtagctcatttcatgttgacgagctgctgcgttgatacgtgtaatccataatttacggaagtcacgtttacgttgacgacggtcacggaaagcatattgacctgatttcattacttgttgcttagctactttgtataatgtatgttttgaaccgaagtaacctttagctaatttaatcgtttttttacgacgcgctcttgttactgttccacctttaactcgtggcataaaaaattcctccttaggtaattcctaccgttttctgtatttgttcttattttttgtatgctaataattgttttacacgtttcatatcgctcttagacactaatctagctttacgtaattgacgtttttgtttagtgctcttgtttgcgaataagtgagatgtgaaagctcttgaacgttttaattgacctgaagcagttcttttaacacgtttagctgctccgcggtgagttttcatttttggcataatataagtcctcctgtaatagctttaattatttttcagctgttggcgctaacatgataaacatttgacgcccgtccattttaggtttttgttcaactgttgctatatctttgcattcatctgcatatttttctagcacacgttgaccaatttccttatgcgtaatggcacgccctctgaaacgaatagatactttacatttatcgcctttagttaagaatttacgtccgtttttcaacttagtttggaaatcatgttcctcaattgttggacttaaacgaatttctttaacattgataattttttgtttctttttcatttctttttcttttttctgttgttcgaatttgaatttaccgtaatccataattcttgcaactggtggtttcgcattcggtgcaacgaccactaagtctaaatctacacgttcagccatttctaaagcttcacgctttgatttaacaccaatttgttcaccatcttgaccgattaaacgtaattcttttgcacgaattttgtcattgatttgagtttgatcttttgctatggttgacacctccaaaatttttacgaaatttgcaccaagcaaaaaggaagagcaggtataaaatacccgctcttccttatacacagttatgtgtaatgtgattaacctgccaactgctttatgcgtcgctacaggtgagaagcgggtgcttctacttggttcgtttcgtattcaacgttgttaatcatatcaacaattcacatttaagtcaacactataactgtaattatttttattttaaccttttatttcatccattgacacgtcttgacgtaaatctacttgttctaatggaatttttttcgttttatatcgaagcttatgataaataaagaatgctaaaaatactgggattcccatatacgtaattaagaagcgactaaaattaaaatctcctgttttaataaagtcaacatcttgaccaataattactacaatacataaaaagccagcaaataatggtccgaatgggaataatttagcagtatattttaatttagatttgtcataattttgtttatcaaatgctcttctaaatcgataatgacttactgctatacctacccaagcaataaaaccagttaaaccacttgctgcaacgatatattcgtatgcaccttttgtaaggctttgtaatacgaaaattatcactacaatgattgctgtaacgagtaacgacatatatggcacaccgtttttatttgttttaccaaatgcttcaaacgctaatttatctttactcattgaatatagcattcgagttgaagcatacatacctgagttacctgctgataacacagacgttaaaatgactgcattcataaatgatgctgcaaacgcaaatccagcatttttaaacactaatgtgaatggagacgttgctacattatcactaccacccattaatgcactactatcataaggaattaacataccgataacaaaaatggctaaaatgtaaaataataaaattctccagaatacttgtttaattgctttcggcacagcacgttcaggattttctgattcaccagccgtaataccaattaactcagtaccttggaatgagaaaccagcgattaagaatacacctagaattgataataaacttcctcctaagttgccaccaagaataggaccttcacctttattaaatatttcgaatcctacaacatgaccacccatgattccgacaatcgttaataaaccaattgcaatgaaaacaataactgtaaccacttttatcaatgccaaccagtattcactttcaccatagacgcgaactgataacgaattcagactaaaaattataactaagaacaacgcactccatgcccaagcgggtatgccttgcaatggtgtccaatattgaatgacttgtgctgcaatcgtaatatctgctgctacagttactacccagttaaaccaatagttccaaccaagcgcaaaccctaaagatggatcaacaaatcttgtagcatatgtactaaatgaacctgatactggcaaatacgtagccatttcgccaagtgacgtcattaagaaaaataccattattccgataattgcgtatcctattaatgcacccaaagcacctgcatcatgaattgctccaccagaagttacaaataaacctgtaccaatacaacccccaatcgcaatcatagaaatatgacgatctttaagtccccttttgacaacattgttactttcattttgaacttttgacatataagctccctttccatgttttagaggccaagaaataaataacctttattcactttcatacccttttttacagaacatagtgatattaaaagtaaaaaagtggctacatacctttaagatatgcaaccactttggcaattatctatataaggtagcacatcacattctgtgacagtacagttcctattcgaaaactgtcccaatagatataatttatggtttatatctatttcggcatctttacctttcacttgttcaacttatgtaccataaatacttctgacaagttactaattaaacatgcaacctctaactcaatttaatattttaactaacttgtaatatacaggattcatcacgcataatcaaccctgtgaaacttgatacgcaataaaaatttcaaagcattttattgcgacaactgtctatctatgtttttttaaacgaatttcatcaactagattccagataaattcatctttttcaactgtttcttggtcttgcgatccatattgacgcacattcacttgattattttcaacttccttatccccaactacgatttgataaggtattttttgcatttgagcttctctaattttataacccattttttcattacggtcatcaatacttacacgaacgccttgagatttcaattcatcttgtaattggcgcgcataatcataatgtaaatcaacgttaactggaatgatttgaacttgttttggcgctaaccaagttgggaatgcacctttagtttcttcagttaaaaatgctacaaatcgttccattgttgatacaacaccacgatgaataacaactggacgatgatgttcaccatcttgaccaatataagttaaatcaaaacgttctggtaataagaaatcaagttgtgctgttgataatgtctcttctttacccatcgctgttttaacttgaacatctagtttcggaccatagaatgccgcttcaccaatcgcttcttcgtacgataagccaagctcatccgctgcctctttaagcatattttcagctttattccacatatcatcatcatcaaagtacttttctttatcttcagggtctctataacttaatctaaagctataatcctcgaaaccaaagtctttatacacatcaataatcatgtttacaacgcgtttgaattcttctttaatttgatcaggtcgaacaaagatatgtgaatcatttaaagtcataccacgaacacgttgtaatcctgatacagcaccacttgcttcatatctatgcatcgttcctagctcagcgatacggataggtaattcacgatatgaatgtggtttattcgcataaatcatcatatgatgtggacagttcattggacgtaataccatagattcagtttcatctaactgcattggtgggaacatatcttcttgatagtgatcccagtgaccagatgttttgtataaatcaacattagcaagtactggtgtataaacgtggtcataccccatgctcacctctttatcaacaatgtaacgttcaatttcacgtctaattgttgcaccgttaggtaaccataatggcaaaccagcaccaactaattggctatttgtgaataattctaactctttaccaattttacgatgatcacgttctttacgctcttctaacatttgtaaatgtgcttttaattcttttttatcaaagaaagcagtaccgtatatacgttgtaacattttgttgttactatctccacgccagtatgcacctgctgtagataatagtttaaactctttaattttagctgttgatggaacgtgaactccacgacataaatcagtaaaatcaccttgactatataatgttacattttcatcttcaggaatcgcgtcgattaattctaatttgtattcatcattgctgaataactctttcgcttcatctcgtgaaaccacttttcgttcgattttcatattttcgttaacgatttgtttcattgtcttttcaatttgttcaaagtcatcagatgagatgttttggtcaatgtcgaagtcatagtagaatccaccttctattacaggacctacaccaaatttaacattaccatataaccttttaatcgcgtgtgccattaaatgtgcagtagaatgacgtaatacctctaacgcttcttcactacctggtgtcacaatttcaattgatccatcagtttcaagcggttttgttaaatctacaagttgcccgttaaatttgccggcaacagcttttttacgtaatccaggactaattgattgtgctatatcttcagtagtagtacctttatcaaacgcctttttattaccatctggaaattgaatattaatttgttccatgttaaaccctcctatttgctttataaatacttttatctgacctcgttaaaaaattgaacaacaatcatcgttttaacattaaacctattaacaataaacagggaatttatgacaccaacaaacatttatgtctgaaaaaacaaaaaatcccgcccctatacaagggacgagatcgtcgtggtaccaccctagttatttaatacaatttatgtattaaatatctctgcttaagataacggtcttgatccgggtattcattacaaataccataaatgaagtagtaatcatctaatttattaaccatattctcatcaaacaatggctttctgtgtaatattgattagatcatcttgtcttcaatcatttaaacgatttagatttgtattcattatacaccaatcattttaaaattcaattgtttctgaaattttctcctgataaaaaatatggtgttgacaaagatttgacacgttcaataatacgtgctgctttagtcttctcttcaccatcacgagtcatcgctaaatgatgttccaattcactatagtcaaaattagaactaaagaatgttggtaattcatgaaccattcgataatgtagcaaaggtccaattacctcatctctcacccatggagtcacttcttcagccccaatatcatcaagcattaaaatgtttgcttctcttacgcgatgtaatttcttttcaaaagaaccatctttaaagccaccttttaatgttctaataaattccggtaaataaataattgtcgaacgtaccttcttagatttgagctgattcgcaattgcacctagaataaaagatttacctgtcccaaatggaccataaaggtaaaggcctttcacttgttccccattagttattgctgtacaaatatcatctgctgccatagctacatcaagacggtctcgttgattcatataaatatctttcaatttggcatttaaagtatctcgttgcatatgatgagatgtaattagctcagcttcaaagcgttcttcgtcgtacttgattttacatgggcattgtaaatagcgtattttaattcggttattatcaacatataactcaggcacatgcccctttacgaaatttggacaatcagcaaatttatgaccgtcataatgtttttgttgatctttatactcttgtaacacatttaagtcttcatcaatcatagcattcgttaattcagctcgatgcgcttccaaaaattgcttaacatctgggtcattgattacttctttttttatcttttctattcttttttcaaagtcctgcgacgtgttaattatacttttaaattgcttcattattgactgtcctcctcccattttttagataatttatctagaaatgcttgtcgatcttgctctaattgttgatcatctacgctattatctttagccgaatcttcttcactaggtttatctctattttctaaccatttaggtgttttttcttttgaaatacgattacgctgcccaaagtatgaaccacgcttttggtaatttccgctagaaccctcatttttaggttgattaacttttttagcgtaattatatgcttctttagctgtcttaataccttttttcttccaatttgatgctatttctaaaatatacgctttaggaagtttcatatcttcttttaacatgacaaattgcaacaaaatattaatgacgccaaaagacattttttcacgttcaattaattcttcaaccattgccttttgcgatatagttggttctgattcagaccaagaagctaacatatcaattggactcgtttgttcaagtaactcaaaccattcatcactttgtggctttggattcacttctgaagatttgcccgtcgaagatgatgtagcaggagatttcacctgtaatttaggcatttgattttcgtgttccattaagtaatacgagcgtgcttgtttacgcatttcttcaaaggataactgttgtccacttgtaattgaatttaaaataacatgcttcatgccatctgctgttaaaccatataaagtcgcgagttgtgttattaaacgctttgcatctttggtaacaatgtcttgactaataaaatgtttacctaacatttgtctcaacatttcaaagtcaaaagattcatttgataaatcgataccttggtacggttcattaatcggaatatcacttgtatcgatatctatttttgtagacggcactttaaaaacatcagtaaattgtcttgttacctgtttaaattcactcaaatcaatttgttgatactcaaagtatttcttcaactcatgaaatcgacgatgctcgacttcactatataaaaagattgacaacattggatcattaaaaaataaatgtgctgaaggcggttgaattaattggtaaacaaattgtgtttcttgttcatcatgtttgacaaacgcctttaacaatccaatcgcttcaagtaagtccatttgttgtctaaactctagtaaattaattttaagttcattcataaaaatataatgagaaagaatcaatgtttcattatgactttctttaacgaattgagtcataaaatggtataaacccactgcttgtgttccaattagcggtgtatacagccgattcaatacctctaaatgattcgtatttaaatcaaagtgttgcataactttgaattgatcctttggtcttaagccgaattcgaaggcttgtcgtcccatttaagcatcactccgtttgttttcgcttaaaatcccttgcatcgatgctaacaattgatcaacatctttaaattctttatagactgatgcaaatctaacatatgaaacttgatcaacatgcattaacaagttcataacgtgttcacctatatctcgtgaagacacttccgtatgaccttcatctcgtaattgccattcaaccttgtttgttatgtcttcaagttgttgatatctaactggtcgtttctcacaagaacgcacaagtccattaagtatcttttctcttgaaaactgctctcttgtgccatcttttttcacaactataagctgactaacttcgatatgttcaaatgtagtgaaacgtgttccacaattttcacattctcttcgtcttcgaatggcatttaattcatcggcatgccttgaatctacaactttagattgtgtagaattacatttcgggcatttcattacatcaccctctttattttgattatgcctaattatactataaatctagagatgaaaaaagaatccctcaatttaattcatttaaccaaataatgaaacaataaaaaacattatatcgttacttattaagtaatttgcatgacaatattattgtattaaaaaataaaaaacctaactccgaagtcagagttaggctataaattaattgtattaacttgcacttacagtttcttttgatgtcaaaagtgctccaatttgctcagcaacatctacaactctatttgaataaccccattcattatcataccaagcaataacttttactttattccctgacatgaccattgttgattttgcatcaataatagctgaatttggattagtattaaaatcaacagacactagtggttgatgttcgacttctatgataccttctaaacctgcattttcaaaagcttggtttacttcttctgcagttacttctttttctaaatcaacaactaaatcaacgagcgatacattctttgttggtacacgtaatgccatgccgtgtaatttaccttctaattctggtaatacttcttttaaagctttcgccgcaccagtagaagtaggaataatgctttcattacatgaacgtgcacgtcttaaatctttatgtggattatcaatatttttttggtcatttgtaatagcgtgaacagtagtcattaaaccattaactattccaaactgattatttaaaacttttgcaactggaccaatgcaattagtagtacatgaagcattactaaaaatgtcaaatgcttctatatctaattggttatcatttacgcctttaactaccatttgaacatgtccaccttttgaaggaccagttaacaaaacttttttggcacctgctttaatatgtgcgatggctttatcaccatgattaaatttaccagttgcatctatagcaatatcgatatctaattctttccatggcaagttttcaggattgcgatcagcaaccaatttaattttatgatctccaacttgcaatccattttcaatcggttcaacttttagattatattttccatgtgtcgtatcgtaattgattaaatgtgcaattgtttcgggtggataactagcatttatcgctactacatttaaatttttattttgtaatgcaatacgtaataccattcttccaattctacccataccattaattgcaatattcgttgacattaaaagcaccccttgatctttatgtgttatactttatggaattagtatagcatattatatgaaatttgaaagcgttttccgttgatttatttatcttttttataaaaaatagtcattacttacatacatcaacgcgtacgtaaagtaatgacttatttatagtgtaatattaatcttcttctccgtaattcggcttttcaatataaccttcttcttctaacaatctctcaaggttttgttttaattcaagtttatcccctaaattatcgataacatgatcggccattcggctttttttatcaatagaaatttggctatagacacgtgctttcgcatcttctaatgacaaattattacgttgcattaaacgatccatttgtatactttcagaagtgtatacaacccacacttcgtctactgtattttccaattcattttcaaataataatggaatatccatgattacattatatccttgttttaaatattcttgcttttcttcttccataatatctcgcacgataggatgtatgatagcatttaattctaagcgtttttctggatgattaaacactagatcacccatataacgacgattcatctcaccattttcatcaattgcttcatcaccaaagacttctcgtacttgagctaaacctttactcccctttttaacagcttccctggctgctttatcagcatctactactttaaaaccgaatacggataagagttctgatactgttgattttcctgaggcgattccacctgttagaccaataactttcggcataatttcactctttctttatttttgacatactggacaataatgactatttcttgtcgcgatgatttttgtttcaatttgacttccacacactttgcataccggctgcttatatacattaagatgcaattgcatctcaccagtttttccatcagcatgacgataatctgaaatacttgtaccgccatatttaataccttcttctagtacttctctaacataataaaaaaccatttcttgttgttggtgtgttaagtcttttacttttttatctggtaaaacacctgcacgaaacaacgcttcacatgcgtaaatatttccacaacctgcgattactttatgatccaaaatcacttgtttgattggtttattcttattagactgttgatgaattcgatttaaataatacgtcaatgcttcatttgaaaaaggttcaggcgctatttctaaaaatgaaggataagatgctacagacgcaacatttctaatttctccaaaacgacgtatatctgaataaattaactttttgtcatttgacaactcaaaaataacatgccaatgcttacgataattaggtatcataatatcttcaagttcatctacaatgaaaaaaccgcccgccatacctaaatgactaattaatgtacgttgttctcgtttattatctagctgaaaaacgatatatttacttcttcgttctacatttgtaatggtatagccttccgataaagttttaaaagtatctaattcaattccttttataattgtttccttgccttgagctttaccttcgattactttatccgaaaatataacgtgttcaattttttgatttataacgtagggttcaattcctctttttacatgttctacttctggtaattcgggcataccattaacctcactttattttgcatcataccaagttgcaccataacttgagtctacttttaatggaacatctaattgcaatgcattttccattatctcttctacaaattcactaaatgaatctacttctgacttaggtacttcaaaaattaattcatcgtgtacttgtaataatagtttagcttgatatgttgtctctttcattttttgagcaaatttaaccattgccagtttaatgatatctgcagcactgccctgtattggcgtattcatagcagtacgttcagcaaagccgcgtaaattaaagttacgactcgtaatatcaggaatatagcgtcgacgatgtagcaatgtttccacgtaacctaaagctttggcatcttttacaatatcagacatatattgttttacacctgggaaactagctaaataatcatcaatgaatgcttttgcttttttacgagtaatacctaaactttgacttaaaccataatcacttatcccataaacaattccaaagttaactgcttttgcttgacgacgcattaaactatcgacttgatcagcttctacaccaaatactttcatagcagttgctgtatgaatatcatcgccgttgataaatgcttctttcatactctcatcttgtgtaatgtgtgctaatacgcgcaattcaatttgagaataatctgctgataatataacgctatcttttgaagttggtttaaaggcttttcttattttacgcccttcttcaagtctaaccggaatattttgtaaattaggatctacacttgataaacgtccagtttgcgctaaagtttgattaaaacgtgtatggatacgttgatcatcactaattaccttttgcaatccttcaacataagtagactgtaacttagataattgacgatattctaaaatataatcaatgataggatgttcaccttgcaattgctctaagacatctacagcagtagaatatcctgttttcgtctttttaataacaggtaattgtaatgtctcaaacaatacaacacctaattgcttaggagaatttatattaaaatcttcaccagctgcatcatggatatttcgaatcaagacgtctaatttttcttgaatttctttttccatttcttctaaatcatgaacatctgtaaatataccaatttcttccatttcacttaaaatcttagctagcggtagctctaaatcagccaagagttctacctgattgtattcttctaattgtttatccatatttggtttcgcaaagtaaattgcatcagtaatagaagcaacatatggatttaaaacatcatcttcaggtaccttaaatttcttaccttttccatatatactcacatcgtctttcacaaaactttgaccgtacaatgaaacaactgattgaacatcactaatcgtacgagatggatcaattatataactggccaacataatatcgaaagaaatattttgaatatcaatccccaatctatgtgatgctacatatgtttttttagcatcatatacgacttttttcgaattcggattttctaaccatgaaactagttcgacataattatttatgtcatccgcattaattacaatatgtttctcacctgtaaataaagagaattttaaaatattatttcgcaaatagttaccaccgtctaattcgaaatggatggccgcttctttcaatgaagtaaaatcaatattatcaaaagacgtttcaatttcaaatgtcttttctattgcatcttcaacgcttgctgattgatcaatgtcagccaacaattgtttgaattctaacttcttaaacaattcgattttttcttgttgttcatcttgatgagtcattaacgtatcttcaagttttacttcaatcggactatctacattaatcgttgctaattctttactcattaatgcatcttctttgctattttgaagtttttcttttaactttttacctgaaatttcatctaaatgttcatagacaccttctactgtgtcaaattggtttagcaattttattgctgttttctctccaacacctgcaacacctggtatattatcagaagtatctcccattaatcctttcatatcaataatttgattaggtgttaacccgttgtatttttccgcaataaagtcaggtgtataatgatcaacatcagtaacaccttttttagtgtaataaatggttacattatccgttgcaagttgtgttaaatctcggtctcccgtaataataattgtctgaaatcccgctttatctgcttctttacttaaagttccgataatatcatctgcctcatagttatctaattcataacgtttaatatgataagcatctaataattggcgaatataaggaaattgctcacttagttcaggcggcgttttctggcgtccacctttatattcactatatttttcatgtctgaaagtcgttttacctgcatcaaacgctactaaaaaatgatttggcttttcttcttttaaaatcttctctagtaacattgcaaaaccatatactgcattggtatgaatgcctgctttgtttgataacaaaggtaatgcataaaaagctctaaaacttaagctattaccatcgattaatactaatttattcacaattttaacctccagaactaatttatatatattttagcatattcgactgtgatgtcgtaattaaagaaactatctcatagagtatttatacacgacctaatttcaaataaaacaagtgcctatatagacttagctaaaaaataaaaaagacataatcatgattgttcttgatgagcactccataaagtcaggttaaaagtccaacttttgagatgcacattatcatttcatgattatgtctactttttaatatttttatgctgctattttaaatttttataggtaagaataagttatgaatcgtctgaaccaaatggaatatatttaactttggtcattttcggtaattcttcataattattaaaccactcttggtaatttttattgattggtgacggatgatgcatataatgttcaaacggcaatgattccactgtataaacctcttgtcgtggatgatctttaatttgttgttttaataactgaactcttttttcatgttcataatgaacataaataaatgcactaagatatatcacagctaaaactagtgatgcacctttaataaaattaacattgattgacttatatttccgaaattcttttaataaaataattaaaatgattacatgtatcgtataaacaatcaaaaaattacctggttctattggagtaacaatgactagtgtcgacgccgaaacacatattgcaataagtaaggaatataaagtgatttgtgttttacgatcattaatagacaaataaatacctacaaatatcgaaaacgcaaagtaaccacatacaattacgttcacaaaaccaaccaatccaatatctgtatttttatttaataaaaactgattgtaaaatagtaaataataaagcggtaaagtgataaatcctatcataatgatacgacgctttaatattgttaaatgtacataccgatcacttctaagcagtagataaataataagcgctgcaatcatacttaaaattataatctgactgaaaatgacaccatatggaagtgacgttgatatcatttctgcaaattttgaaaagataccttgattatttgaaacttgttgatattctgatccttcaaataaaattttgcgataatttggattggaaaacataatgattgtacctatagtagcaatcataaatgaaaacaataatttataattaagtgttcgatttgcagtaaattcatatagaaaagctaaaattaaaatgatacagtggaataatgtcacattctccataaataattgaccgaagaagcataaaacatagaatagtacagtaacacttaccggctgcttttctttatatataattgcattaatacaataataaataataaagagtgaaattagtgttgatgtcgcataattataaaatcctgcaaaccagccatatgtatctgcataaatagcacttggtaaaattaacattaaagaaaatgctaacaaataatagcttgtccacgctttacaacgtgtaatgtgcataatcatccaaatgatgcccatactaatgagaccatatgaaagccaacgtaaccagcttacatgtacagctataatttcaaagatatttccgatatagcgaccattaagtgatgcaaatcctacttttaaaatatcagtattataattgctaaaccattgtaaatcatcgtgcatgagtggtagtaagatacccataaaagtataaaacaataatatcgcaattaatatcaaagttgtcttgtgtaattgaattgttttcactttgctaatcctcaaatctagttaaattttcctcaacttgtaggtcgaaaaattaattcaatatttttaatgtatttctaattttcacctatgcatgtttcctcaatcaaattagataaataaggtatttaatattactttcaacaatttatctaaatcgcccctcgtctttttctatgacgaatgattacacttgtctattcaagtgtttaaattaagatttatttccgttcaaataaaacttattactttttaattaagcatctattttaagcgcgttactaaaatttctttattataataaatatattataaaattgcttgattcacaacaatctattacttataacttacaaatcgacatatacaaatgacaaaattgacaaccgaatttattccacttcattaactctaatttaataccaatagagatttgaacgaaataaaaaagcagcaacaacttcgtgaaaaatacacgcgctgttaccactttaatttttattctttataatcttttagaataactttgaacgttgagcctttgccaacttgactattcacttcaatattgccttggtgggcctctactatatgctttgtaattgataatccaagacctgtcccaccagaatctctacttcgtgctttatctactctataaaatctttcaaaaatacgttgttggtcttctaatttaatacctataccaaaatcttgtacttcgaaaatgacacgaaagtcatctcgatacacacgaacgttaatatctccatcttcataagaatagttaattgcattcgttaacaaattcgtgataacttgagcaattttactttcttgtgctttaacaatgacatctttttcaatatcagtatgaatggaaatatttttttgattggcttgagtcatcatattatcaataatacgccgcgttaaatctgataaattcatatagtctgtatctaactctgtatgttgctcaatatgcgataaatctaacagatctgttactaaagattctattcgatttgattcttttaaaattatgtttaaaaacatgtctaatgattccgcatcattttttgcaccatcaataagcgtttcagcaaaccccttaattgaagtaataggtgtttttaattcatgtgaaacatttgctacaaactcacgtcttagattttcaagttgtttcagatttgttatgtcatgcatcacaactaaaatcccttgcaaacttttttgagacctagttaaaatcggaacgcatgaaatatcaaagtacttggcatggacttggtttattgcaacttccaattgttcataaataggtttttcaactttaaaactttctaaaattaattgctcaatttcagtattaacataaccgtgatagcctacttgttcaatattatgcgagatgttgaactgttcataatacgctttatttgcaacaacgatttttccatttcgatctatcattaaaatagcacttggaatattttcaatcgttgtttttaaacggttggattgaattttttgctcattattaagcttttgaaggcgtcgtgctaaatcattggtagacacaaaaagcgctttagtttctacaacattactttcaggtacacgtatgtgataataaccatttgccaacaattgtgttgcataagtaacttcttgaatgggacggattaatgtacgcttaaaactacggcttgcaaaatacagacaaatgagtacaactaaacatgtcaaaataagatatttccacaacgtccaatgcatttctgtaatatcgttattgtaacctttaatccatacatgataaccgttaaccttcttattaaaaataaaaaagtcccttttttgaatatagctatcactatttgggatagctttcagtttgccactactaaacacctttttatcatgcttagttatcaataaatctatattttgctgttttacaatttctttaactttatcaatctcattatcttggactaaataaatatatgatcttgcatctgttgctagagcttgttcgtgtttttctgataaaacatatgtgatggaagcgtgaataataatgcctaatgtaacaaaactgataattaatatactgcttatcaataacattaagcggtggtgaaacttcatcattgttctttaggtctttccaatttatagcctaagccacgcacagttttaataagttgtggcttcttaggattatcttctaatttatctcttaaatgactgatatgtacatcgacaattcttgagtctcctgcaaattcataattccataccgtatttaacatatgttctctcgtaatgactctgccttgtctttctatcaaataaagcaagagttcaaattctttcggtgttagctccaataactcattatgcttatatacttcaaaataatcgggtctaatacgtatcgatccgatggtaatatcatcatcaacctcttctacttcttttacaaattgagaacgtcttaaaatggctttcacacgggcaacaacttctctaggtgaaaaaggcttagtcatatagtcatcggcacctaattctaaacctaatacccgatcaaattcatcatttttcgccgttaacattaatatagggactaaatttttatttgttcttacagtcttacatacgtcaatgccatcttttttaggtagcataacatctaaaataattaaatctggctgttcactttctaccttttctaaagcctcatcaccatcaaatgcgacaacaacttcataaccagctgtttctaagttatatttaagtaatgttacgattgaatgttcgtcatctactaccaacactttttgcgacatggtatgcctccctaacttataattatatttacattataaccgaactatttataaaaataacatcctacacattatctttacacattttttacattactttacatataaataaaatacttcttatatttccttctatcatttgcatgacttactctgggacaacgaaataaactttttgaaaatatcatttctatgccactacctatgcatgagttttactcatttattcctaagcttatgtacacaatcgctttgtctaatgtgtaagaaacactatataatcaatcattagttactctttattatttctatcctgttgccaacttcaattcatttaaaaaggcgaacctagcaattaaagttgctagactcacctatttttattttgcttattttaaatttttaatcaattcatctgcaaatgctgatgtagaaacttcttcagcaccatccattaaacgggcaaagtcataagtaacaacttttgaagcaattgtatcttcaattgaatctgtaatcttatctgccgcttcttgccatcctaaatgttctaacattaatacagaacttaaaattactgaagatggattcactttatttaaacctgcatattttggagctgtaccatgtgttgcttcaaaaatagcatgacctgtttcataattaatgtttgcacctggcgcaataccaataccaccaacttgtgcagctaaagcatctgaaatatagtcaccattcaagttcatagttgctacaacatcatgctcagctggacgagttaaaatttgttgtaagaaaatgtcagcaatagaatctttaatgataatcttgccttctttttcagctttttcttgagcagcattagcagcatctctgccttctttttcaacaatttcgtcatattgttgccaagtgaatacttgatcaccaaattcagataatgctaaatcgtaaccccactgcttaaatgagccttctgtaaatttcataatattacctttatgaactaaagtaactgatttacggttattatcgatagcatattgtatagctgctctaactaatcgctcagttccttctttagaaactggtttaataccaatacctgaagtttctgggaatcgaatatttgtcgcacccatttcgttttgtaagaagtcaattacctttttaacttctgttgtaccttctttaaattcaataccagcataaatgtcttcagtattttcacggaaaataaccatatcaacatcttgtggacgtttaacaggtgatggtactcctttaaaccaacgtaccggtcttaaacaagtaaataaatctaattcttggcgtaaagccacatttaatgatctaataccaccaccaattggtgttgttaaaggtcctttaacagcaattaaatattctttaattgtatcaagtgtttcttgaggtaaccattcaccagttgtatcaaatgctttttggccagctagcacttctttccattcaatgcgtttttcgccattataggctttctcaacagcagcatctataactcggcttgctgccttccaaatatccggtccaattccatcaccgataataaatgggataattggttcattaggtacgtttaatccttcagttccttgagtaattttttctgcagtcatagttattttacctccaaattttacatcttcatttttaatttgtattgattattttctttcttcaagcgggatatacttacgattcgtttcgccaatatatttcgctctaggacgcataattctattatctttatattgttctaaaatatgagcaatccatcctgcagaacgacttacagcaaagattggcgtgaataagtcatgaggtatttccatacagtgataaacactcgcactataaaaatcaacattaggaattaatcctttttcttctgccatacgtttttccattttcactgacatttcaaataattcttcacgaccagcgtctttcgtaatttgacggctcatttctcttaaatatttcgctctaggatcaccatctttatatacacgatgaccgaagcccattactttatctttattagcaaatttttcatctaagtaagcatcaacattttcaattgacccaatctcagataacatcgtcataacttgttcgtttgcaccaccatgtaatggccctttcagagaacctacagctgctacaatacctgagtacatatctgacaatgatgataccgcacaacgtgctgtaaatgcagatgcgttcaactcatgatcagcgtgtaaaataagtgctttattgaaggcttctacttctatatctgttggtaattccccacgtaacatatataggaagtttgccgcataacttaagtcaggattaggcttaagtggttctttatcttgtcttactcgagcaaacgctgtaactaatgatgctactttagcctgtatacgcattgctctttcataacgattttcatctgattcattttcagcatcaggatcaaaatgtgcaatatatgataatgacgtacgtaatgctgtcattggatgcacgtgatctgtaacatactcctcaaaatgtgtatacacacgaggatttaatgtcatgtattgatttaatttcccttttagatgagcaagctcttcttcgtttggcaatctatagttccataataggaaaataacttcttcaaattgcgcattttcagctagatcatcaatatcatagccggcataagtcaattgactttcaataattgaacttattttagtctccgctgcgataaccccttctaaacctctttgtaattctgccatgataaatttcccctttactgtttctttatgaaatggctttcaactaatattatagctaaacgcatttcgtttgtgaaatataaaaactggcattatatgtgcaacaatttttttgtaaatctatgtaaatgtcacagaatagccacaaatagcaccattaaagctttttcaagatgtgaataatccatgaattttacaatagaattaaattttcaattggttattatatatgattataaaaaccaaagtatattaacatggaattttacacatttttaccgaaaataattgtatatatctcaatataagtgcataataaacatatctatatttaagggagatgtattatggctgaaaaattacaaagggaactgagcaatcgccacatacaattaattgcaattggcggtgcaattggtacaggcttattcttaggtgctggtcaaacgattgcattaaccggcccttcaattctattaacatacatcattataggatttatgttatttatgtttatgcgaggtttaggagaaatcattatacagaatactgaatttaaatctttcgcagatgtaaccaatacatatattgggccttttgcaggatttgttaccggatggacatactggttctgttggattattacaggtatggctgaagtaacggctgtggcaaaatatgttagcttttggttcccagaaattccaaactggataagtgcactattttgtgtactgttattaatgtcattcaacctacttagcgcaagacttttcggagaattagaattttggttctctatcattaaaatagcgacaattattggtttaatagtagttggtttcgtcatgattctatttgcatttaaaactcaattcgggcatgccagtttcacaaatttatatgaacacggcatattcgctaaaggtgcttctggattctttatgtctttccaaatggcactattctcatttgtaggaattgaaatgattggtgttacagctggggaaacaaaagatccagttaaaacaattccaaaagcaattaacagtgtacccattagaattttaatattttacgttggggcgttagcggttatcatgtctattatcccttggcagcaagttgatcctgataacagtccattcgtaaaattattcgcattgatcggtattccgtttgctgcgggcttgattaattttgtagtattaaccgctgctgcttcatcatgtaatagtggtatattctcaaatagccgtatgcttttcggtttatcaagtcaacaacaagcacctccgaacttttctaagacgaataaatatggcgttccacatgttgcaatctttgcttcatcagcattattacttgtggcagcattactaaactatattttcccagatgcgacaaaagtatttacgtatgtgactaccatctctacagtgttatttttagttgtatggggtctgattatcattgcatatatcaattatagtcgtaaaaacccagatctacataaaaatgctacgtacaaactattaggtggtaaatatatgggctacttaatatttgtattcttcatttttgtgttcgggttattatttattaatgttgatacaagacgtgcaatttattttattccgatttggtttatacttttagcatttatgtacttaagatataaacgtatcgctgctaaatcaaataaataacaacaagttttacccctgttgaatatactaaagttcaacaggggtttttatatgcaacttataatattaaattgcgtacttggctcaaaacttttactttctcatctatttaataatgtatcatttcagaaatacatccatacttctattttataataaatttccaaagtaatatgagtgaaagtttgaaggtgataatgtacatgtataaaagatataaacatttatatagattgccattcatacactatcattatcaaataacctattaattacgtcataaaataccagatgaaccaaaaaacgcctttccattgttgataaatggaaagacgtttttttataaattatagtacgtttgcatatccttcaaagattttaccttgagcagcatcaatcgtaactaacatgttattgcttatgtttttaacagctttttctacacctacaactgttggaatacctttttctaaaccaacaattgcacttggtgatgtaataccattttcttctgtaattaagcctaaagctttttctacataaggtacaaacgtttcatcgattgagttagtaacgataactttgtcagataaatctttaccttctaaatctttaacagtttcagcaactaacgtagtaccaacaactgatccacgtccaataccttgaccattagcaatttcgtcaccaactaggtggattttcatcatattagtagttccagtttcaccagttggtacaccagcagtaataatgattaaatcaccattagatactctaccagtttcaacagctgttgcaactgcattgtttaacaatgcatctgtactcttacgtccttttttaactacaggttgaactccccaaacaattgaacattgacgtgcagtttcttcacttggagtcactgcaataatgtctgaatgcggacgatatttagagatagtacgtgccgttgaaccactttcagtagcagctacaattgctttaacatttaagtttaaagctgtatgtgcaaccgaaataccgatagcattcactaatgaagtttcaactaatttagtacgatctgacaataactttttgtaatcttgggctgcttcagctgatacagcaatatttctcattgttttaacagcttcttcaggatataaaccagcagcagtttcaccagataacattactgcatctgtaccatcatagattgcgttggcaacgtcactagcttctgcacgtgtagcacgtgggttacgttgcatagaatctaacatttgtgtagctgtaataactggtttacctaatttgttacattgtctgattaaatctttttgaaccattggtactttttcaggtggaatttcaacacccatgtcaccacgtgcaaccattaaaccatcagacacttcaagaatttccgcaatattatcaataccttcttggttttcaattttagggaatactgaaatgttagctttttgttcttctaaaatttcacgaatttctaaaacatcactaggacgacgtacgaaacttgctgcaatgaagtcaacattttctttaataccgaaacggatatcttcagcatctttttctgtaataccaggtaaacttactcttacgccaggtaagttaacaccttttttgtttttaagctcaccagagtttaaaatatcacatttaacttcttttttagcatggtcaatatctttaacttgtaattcaattaagccatcatcaagtaaaatgtatgaacctacttgaacatcgttaattaagttttcatatgttactgagaacttttcaggtgttccttcaacttcattcatgctaacaataacttcgttaccacgttcaagttcaatgataccgtctttcatattatgcgtacgaatttctggaccttttgtatctaataaaattgctacaattttgtctaatcttttagctactttacgaattgtatcaattctacctttatgctcttcatgactaccatgtgaaaagtttaatcgtgcaacgttcataccagcattgattaatttctcaatcatttcttctgattctgaagctggtccaattgtacatacaattttagtttttctcattttataattcctcctgaaatcttatatagataacttgttagcaagttcatatagactataatcaaatttatgatctttaccatcaaaaatttcatcaaaagatgttgctacaattttattgttcttaattccaacacccttagctgtttcaccttgcattaataagtctaccgcatatccacctaaacgtgatgctaaaactctatccgcacctgttgggctaccaccacgttgaacgtgacctaacacagacactctattatcaacattgatgtattgtgataattctttttgacaatcttgcgcagtcatacaaccttctgctacaagaacgattgagtgtttcttaccacgtttaataccttgttcaattttatcagctatttctttaatatctgttttcacttctggaactacaattgtctcagcaccaactgataatccagcccataatgctagatctccacaatcacggcccattgcttcaatgataaatgttcgtgcgtgacttgacgcagtgtctctaattttgtcgactaagccaataatcgtatttaatgctgtgtcaaatccaattgtaaaatcagtaccattgatatcattgtcaatcgtaccaggaataccgatagtttgaatttctttgcattcctcactgatgcgttgtgcaccgcgataactaccgtcaccaccaataactacaaggccctcaatccctcttttacgtaagttttcgattgcaactttacgtacttcttgctccttaaactctggacatcttgctgaatacaagaatgtacctccacgctgaatcgtatccccaactgatcctaattcaagtttatgaatatcatcatttaacaatccttggtaaccatgatacacaccataaacttcaatttcattgtaaattgctgtacgaacaactgctcttacggcagcattcattccaggtgaatctccaccactagttaaaactgcaattttcttcatgacgacatacctttctataactgatttatctttaactctaaattaccacaaattgatatgtcattccatcaaaactaatgtattgaattgatgtaaacgttttaaatattgaattttattttaacttaattaaaaaaagattagtagccacaattttgactactaatcttagttaaaattcagtatctaaatattaaattattgttttaatgtacttcaatttatggtaaaacccagtatcgatttaacataaaaatgctcaagttgattattctatataagaaccgatatttctgaatttttcaaagcgatcattagcaatttcatcacgtgataatgactcaagtgaatctaactgtgcaacaaacgctgatttaatagctaaagcttgctgttcaatatctttatgtgcaccgccaagtggttcagaaatgacatcatctataatacctaattgcttaatatcatgggcagtaattttcattgtttcagctgcaattttagccaaattactgtctttccataataatgccgctgcaccttcaggagatataacagagtaagtactattctctaacatcaatactttattggcaataccaatacctagagcacctccactgccaccttcaccaatgacaatcgcaataactggtacttttagtgaagccatctcaatcaaatttgttgcgatagattcactttgtccacgttcttccgcagctttaccaggatatgcaccttttgtatctataaatgtaaagataggacgattgaatttttcagcttgtttcattaaacgtaatgcttttcgataaccttctggatgcgccataccaaaatttcgataaatattatcttttgtatcttttccacgttgttgtccaataactgtaacagcacgaccatttaaaaagccaataccaccaatcattgctggatcatctctaaaattacgatcaccatgtagttccataaacgaatcaaagatatatggaatataatctagggtcgtaggtctttcttgcaaacgcgcaatttgcacacgatcccatggttttagatttgtatatatttttttagtttctcgttccaatgacgcttcaagcatgtcaatttcttcttgtaaatccacatcatttttatcttgagattcttttaaagattcaattttatttcgaatttcaaaaagtggtttttcaaaatctaacattatttagtcacctcttgatggatttttagaatttcagacaatgtttgacgcatattattacgatgtacaactttatccaattgtccatgctctaataaaaattctgcagtttggaaatcatctggcaatttttcgtttattgtctgttcaataactcgacgacctgcaaaacctatcaacgcttttggctcacttaaatttatatcaccaactgatgcaaaacttgcagatacaccaccagtagttggatgtgttaaatatgatatatataatagtccagcgtcagaatgacgttttaaagatacactggttttacccatttgcatcaaggaaataataccttcttgcatacgtgcaccaccacttgcagagaaaagaataaatggtaaacggttctcagtgcagtaatcaatgatgcgacatatcttttcaccgataaccgatcccatacttcccattctaaaacgtgaatccatgacagcaacgccaaatttcataccatctagttgcgctgtaccagtcacaactgcttctttaagacctgtcttttgttggtccttttcaattttttctaaataacttggaaaatctaatggattcgcagaggtcattcccttatcgaattctgtaaatgatccttcatcagaaattgcttctatacgtttatacgcagttaaagcaatatgatgatcacaattaaagcacacatttaaattttcagctaattcttttgtgtacataattttcttacactttggacacttagtcataatacctgcaggcacatcattatttttagagtcttgtactgtaagatatttctttttctttgttcgattaaaaaaatctttaaacataggaaaacctccaaataacctctgttctaaccatttagagccttaaactgaacttgaccagttaaaaacgggtttaaatttatttgatttatattcgtttgactgttgaatgtttatcataaactttcattttcatcattttaatgactctttattgctaacttttaagcaatttaattaaacgttaattatttttattgtaaatctgtaagtttcattgttttatcatacacatcttgcggatcaacttcaatcctagctactccagattccattgccgctttagcaacattacgagcaactgatggcgctacacgtttatcaaacggtcctgggatacagtagtcttcatttaattcagaactatcgattaaatcagcaatcgcttctacagctgcctttttcatttcttcatttatatgtgtagcttcaacctctaatgcacctctaaaaataccagggaaagctaatacattattaatttggttaggatagtctgaacgtcctgtaccaacaactcgtgcacctgccgctttggcatcatcaggtattatttcaggatttggattagccattgcaaatataattggattatctgccatactcttaaccatatcttgtgacagcgcattagctacagaaactccgataaatacatctgcgtcttttacgacttcttctaaagacccttcaatcttatctttatttgtccatttagctacaacatctttcgtaggattcataccatatgaacgtccttcaaaaattgcgcctcttgagtcacacataaccatatttcttacaccatacgcgtatagtaatttaacaatggctattcctgctgcaccagcaccatttagtacaacttttattttagcaatatctttgttaacaactctcaatgcatttaccaaacctgccattgttacaattgctgtaccatgttgatcgtcatggaataccggaatattagtttcttttttcaatcgttcttcaatttcaaaacaacgtggtgccgaaatatcctctaaattaataccaccataattaggttctaacaacttaactgttttaatgatttcttcggtatcagttgtatttaacgcaataggcaccccattgataccagcgaagcttttgaataatactgctttaccttccattacaggaatacttgcttcaggtccaatgttacctaaacctaataccgctgttccatcagtaataactgcaactgtatttcctttaattgtgtaatcatatacttttcttttatcttcataaatatctttacacggttcagcaacgccaggtgagtatgctaaacttaattcctctttattagtaacttttacatttggtttaacttctaatttaccttgattacgtttgtgcatttccaatgcttcatctcttaatgacatgaaatcagcccctaattcaatatttatttttaaaaaataacttggataaaacgcattacattataaaagtaaaaatattgggtaaatctgaatgagtaagaatttatggttttgattatgtaacacaaatagcgataaacgataataaaataatatttataaagatacattaaaccatactatctaaagatatacctttaattattataatggatagcaaaaaccaatatatcaaaaagttattatttttccgcacgatatatcgacaaaattctttactcaatttatgtatactgctttttgtgctaattattcttatggattaatcaataatgtaaagtgaaactcataaaaataataagcataaaaaactaatataaacgcaaactgatggttagaaaatatctaaccatcagtttactatatcataatttattagttgataaaagttatataagcctaatatcactagggttaaaggattgtataaaattattaaacatactatctttttgattaatatagcctaaagtagtcatttgtttaatcgtttcatcataaaaggataacacaacatcattagcattctctttcgtagctttaatcatctcttcaaacatatctatttgtgatttatttctaattataatttgtttggcaaatgctaatttttgttcttcaaaagtggctaatgtctgaatctcatttataattagttgacgttgttgctttctatggtcaaatttcccgctaactataaacaagtcattatgtgataacaactcttcgtactttttaaactgattagggaaaatcacaccatctaaagtttcaatgccatcatttaatgtgacgaatgccatattttgaccatttttagttcgaatttgtttaactttatcaaactgtactaatataggtttattattctgcgcgttactcaatttaaatatcgttaaatattgtttggcaacaaactttttatctactgggtgttgcgaaacataaaatcctaaatattctttttcgtactgactaataagtgcatcaggcaattcttctttatcttcatacatctgttttggcgttaaaatatcaaataaaaaaccatcttgttcaatgtttaaatcgccatccaacacttgatcaatagcttgcaacaacgttgaacgtgttttaccaaaagcatcaaacgctcccactaaaatcagtgcttcaagtaactttctcgttttgactctcttcggtatacgtctagcaaaatcaaagaaatctttaaatttgccgttctgataacgttcatcaacaatcactttcacactttgataaccaacacctttaattgtaccaattgataaataaatgccttcttgggaaggtttataaaaccaatgactttcgttaatgttcggtggcaatatagtgataccttgtttttttgcttcttctatcatttgagcagttttcttctcacttccaataacattacttaaaatatttgcgtaaaaataatttggataatggacttttaaaaagctcataatgtatgcaattttagaatagctgacagcatgtgctctaggaaaaccataatctgcaaatttcagaatcaaatcaaatatttgcttactaatgtcttcgtgataaccattttgctttgcaccttctataaaatgttgacgctcactttcaagaacagctctattttttttactcattgctcttcttaaaatatccgcttcaccataactgaagtttgcaaatgtgctcgctatttgcataatttgctcttgataaataataacaccgtaagtattttttaatatcggttctaaatgcggatgtaaatattgaactttgcttggatcatgtcttcttgtaatgtaagttggaatttcttccattggacctggtctatacaaagaagttacagccacaatatcttcaaagtgttccggctttaatttttttaatacacttcttacaccgtcagactctaattggaatatgccagtcgtatctccttgcgacaacaattcaaacactttttgatcatcgaacggaatcttttcgatatcaatattaatacctaaatcttttttgacttgtgttaagatttgatgaataatcgataagtttctcaaacctagaaaatctatttttaataacccaatacgttcggcttcagtcattgtccattgcgttaataatcctgtatcccctttcgttaaaggggcatattcatataatggatggtcattaataataattcctgccgcatgtgtagatgtatgtcttggtaaaccttctaactttttacaaatactgaaccagcgttcatgtcgatggtttcgatgtacaaactttttaaaatcgtcaatttgatatgcttcatcaagtgtaattcctaatttatgtgggattaaacttgaaatttcatttaatgtaacttcatcaaaccccataattcttccaacatctctagcaactgctcttgcaagcagatgaccgaaagtcacaattccagatacatgtagctcgccatatttttcttggacgtactgaatgaccctttctcggcgtgtatcttcaaagtcaatatcaatatcaggcattgttacacgttctgggtttaaaaaacgttcaaataatagattgaatttaataggatcaatcgttgtaattcccaataaataactgaccagtgagccagctgaagaaccacgaccaggacctaccatcacatcattcgttttcgcataatggattaaatcacttactattaagaaataatcttcaaaacccatattagtaataactttatactcatatttcaatcgctctaaatagacgtcataattaagttctaattttttcaattgtgtaactaagacacgccacaaatattttttagctgattcatcattaggtgtctcatattgaggaagtagagattgatgatattttaattctgcatcacacttttgagctataacatcaacctgcgttaaatattcttggttaatatctaattgattaatttccttttcagttaaaaaatgtgcaccaaaatcttcttgatcatgaattaagtctaattttgtattgtctctaatagctgctaatgcagaaatcgtatcggcatcttgacgtgtttggtaacaaacattttgaatccaaacatgttttctaccttgaatcgaaatactaaggtggtccatatatgtgtcattatgggtttcaaacacttgtacaatatcacgatgttgatcaccgacttttttaaaaatgataatcatattgttagaaaatcgttttaataattcaaacgacacatgttctaatgcattcatttttatttccgatgatagttgatacaaatcttttaatccatcattatttttagctagaacaactgtttcgactgtatttaatccatttgtcacatatattgtcataccaaaaatcggtttaatgttatttgctatacatgcatcataaaatttaggaaaaccatacaatacattggtgtcagttatggcaagtgcatcaacattttcagacacagcaagtcttacggcatcttctatttttaagcttgaatttaacaaatcataagccgtatgaatatttaaatatgccaccatgattgaatggcccctttctattagttaagttttgtgcgtaaagctgtagcaagttgctcaaattcatcccagctgtccactgaaactcctgacgcattcggatgaccaccgccaccaaaatcttgcgcaatatcattaataatcaattgccctttagaacgtaatcgacatctgatttcattaccttcatcgactgcaaatacccatattttcaagcctttgatgtcagcaattgtattaacaaactgagatgcttcatttggctgaataccgaattgctccaatacatcttcagttattttaacttggcagaatccatcatccataagttcgaaatgttgtaaaacataaccttgaaacggcaacatttttgggtccttctccatcattttatttaaaagcgcattatgatcaatatcatgcccaattaactttccagcaatttccatagtatgttctgaggtattgttaaaaaggaatcgcccagtatcaccgacgataccaagatataaaacgctcgcgatatctttattaacaattgcttcatcattaaaatgtgagattaaatcgtaaatgatttcacttgtagatgacgcgttcgtattaactaaattaatatcaccatactgatcaactgcaggatgatgatctattttaataagtttacgacctgtactataacgttcatcgtcaattcgtggagcattggcagtatcacatacaattacaagcgcatcttgatatgttttatcatcaatgttatctaactctccaataaaacttaatgatgattccgcttcacccactgcaaatacttgcttttgcggaaatttctgctgaatatagtattttaaaccaagttgtgaaccatatgcatcaggatctggtctaacatgtctgtgtataataattgtatcgttgtcttcgatacatttcataatttcattcaaagtactaatcattttcatactcccttttttagaaaagttgcttaatttaagcattagtctatatcaaaatatctaaattataaaaattgttactaccatattaaactatttgcccgttttaattatttagatatatatattttcatactatttagttcataacgattataggacatcaagcaatattatactagcaacagttgaccaaataaaaatgcacaaataacaagctttatttaattcaggggccacaacatagagaaattggacccccaatttctacaaacaatgcaagttggggtggggccccaacatagagaatttcgaaaagaaattctacagaccatgcaagttggggtgggccccaacatagaagctgacgtaatgtcagcttactataatgttcaagttgggccccaacgtttgtgcgaaatctatcttatgcctattttctctgctaagttcctatacttcgtcaaacatttggcatatcacgagagcgctcgctactttgtcgttttgactatgcatgttcacttctattttggcgaagtttcttccgacgtctagtatgccaaagcgcactgttatatgtgattcaataggtactgttttaatatacacgatatttaagttctctatcatgacattaccttttttaaatttacgcatttcatattgtattgtttcttctataatacttacaaatgccgctttacttactgttccgtaatgattgattaaaagtggtgaaacttctactgtaattccatcttgattcattgttatatatttggcgatttgatcgttaattgtttcacccatctgaggctgtcttcctaaaagttgcatagactttaaaacatcttgtctattaatcacacccactgtctttttattactcgaaacgacaggaatcaattcaataccttcccaaatcatcatatgcgcacaacttgctactgtactcatagcatttacataaataggatttcgcgtcatcactttatctatttcgtcgtcgtcctttgtattaatcatctctcgacttgttacaatacctactaatttataagactcattgactaccggaaatcttgtatggccagttcgattcgccatacgcttataatctgctattttcatcgtatcaaacagcacagataaatcatctaatggcgtcattatatcttgaactattaagatatcttttcgtattttctgattaaaaagtgctttgttgataatatttgcaactagaaatgtatcataacttgatgatagaacaggtaaatcatgttcattcgcaaaattaataactttattagatggcttaaatccaccagtaattaatatagccgtacctctttttaaagcttcaatctgcacatcttcacgatttccgacaatcaataatgtctttggaccaatatattttaaaatatctttgagttccattgctccaattgcaaatttagataccatcttagtgatacctttattgccacctaacacttggccatcaataatattgacaatttcattaaaagttaaatgttcaatttcattacgattacgtttttcgattcgaaccgtaccaacacgatctatcgttgcgaccatgcccattttatcagcatctttaattgcacgatatgctgtcccttcagatacgtttaaaaatttagcgattttacgcaccgaaattttagagcctatagataacgattcaatataatctaaaatttgttcatgttttgtcattctttacctcttcttttcgaacagtattaactacattataactttattttggataaaaagcattgaagtgaaatgaaataatgatcgtttcacctattttattttttgaaaatatacaacaaacacaaagatcacaaaatctttaattttaaatggaaaaatccattattatttattagaatgtaagtgaggagggatgtactaatgtataaaaatatattacttggtgtagacactcagttaaaaaatgaaaaagcactaaaagaagtgtctaaattagctggcgaaggtacagtcgtaacagttttaaacgcaatcagcgaacaagatgctcaagcatcaattaaagcaggtgttcatttaaacaaacttactgaagaacgaagcaagcgattggaaaaaacacgcaaagctttagaagattatggtattgattatgaccaaataattgttcgtggtaatgcaaaagaagaactattaaaacatgctaatagcggtaaatacgaaattgttgttttaagtaaccgtaaagcagaagacaaaaagaaatttgtacttggaagtgtcagccacaaagtagcaaaacgtgcgactatccctgtattaatcgttaaataaaatttttatccagaatcacaaataatctttcaatcatgatgcagtctcaaacgactgagtaaatacaagaaacgattatgactgtggttctggattttttatatcgtagtaaatttataatcaatgtctaattgtataaaactaaaattacgagagtaggtcagaaatgataaagaaccactgatgtcccccgtccacgtcgtaactgaatcagtagaatataaaaacacccactaaaaatatgcagacgataacttccacatagattagcgaggtgttttttagtgtaaaatctatattctatttaaaactgaacagattcacctggttttaaaatttgcacgtcccctacattaacagcatctttaaattgttgtggatcttgttcgattaatgggaatgtatcataatgaatcggtacagaaatttttggtttaataaattcattaatagcataacttgcatcatcaatacccatcgtaaaattatctccaattggtacaaaacatacatcaactggatgacgtttcgcaataagtgacatgtcactaaacagacctgtatcaccagtatgataaattgtttttccttcaacttcaaacacgatacccattggcatacctaaataaactggaataccattttcatgtgtaaaacttgaactatgaaatgcttgaacaaatttaacgcttccgaaatcaaagtttgctttaccaccaatattcataccatgaacattttcaacaccgtgatatgaagaaagatagtcagccatttctgcacttccaattactgttgctcctgttttctttgctagttccacaacatcaccaaaatgatcaaaatgaccgtgcgttaaaacgatatagtctacctgcactgtttcaatattcaaatcacacttagggttatttgaaataaacggatctacgataacctttttgttgttcccttctaaataaatcgttgattgaccatgaaatgataacttcatttgagcatcctcctatcaattactatataaatttagtacccttttgccacttaattataacaaattctcaaattttaaaaattgaaaatctagttaatgtattagctcgattttgaaatctaataataattggcataaaatggaagtaatattatgttgaggagtgtttataaaatgacaaaaatatcaaaaataatagacgaattgaacaatcaacaagctgatgcagcatggattacaacaccgttgaatgtatattattttactggataccgtagcgaaccccatgaaagattatttgcattattgattaagaaagatggtaaacaagtactattttgtccaaaaatggaagtcgaagaagtcaaagcatcacctttcacaggtgaaatcgttggatatttagacactgaaaaccctttttcactttatcctcaaacaatcaataaattactaattgaaagcgagcacttaacagtagcacgccaaaaacaattaatctctggtttcaatgtcaattcattcggagatgttgatttaacaatcaaacaattgagaaatattaaatccgaagatgaaattagcaaaatacgtaaagctgctgagttagcagataagtgtatcgaaataggtgtttcttatttaaaagaaggtgtgactgaacgtgaagtagtcaaccatattgagcaaactatcaaacaatatggcgtcaatgaaatgagttttgatacgatggttttatttggagatcatgccgcatcacctcatggcacaccaggagatcgcagattaaaaagcaatgaatatgtactatttgatttaggtgtaatttatgagcattattgtagcgatatgacacgtactattaaatttggtgaacctagcaaagaagcacaagaaatttataatattgtattagaagcagaaacatctgcaatccaagcaattaaacctggaataccattaaaagatatcgatcatatcgctagaaatattatttcagaaaaaggttatggtgaatatttccctcatcgcttaggtcatggcctaggattacaagaacatgaatatcaagatgtttcaagtactaattctaatttgttagaagctggcatggttattacaatcgaaccaggtatttatgtacctggtgttgcaggtgtaagaattgaagatgacatacttgtcactaatgaaggatatgaagtattaacacattacgaaaaataaggagtgggataaaaatgaaaagcttgttacaagcgcattctcattcagtcaaacactgccaatataacattgtagcgcctaagacataaatttttatccaagtctaaatgcaatatgtaacaaacaagctagaaacacatatgcaggtatgttcatcagtaacatgtaatgaatcaaatcaatatcattcatgttcgatgatttcttcgcattgtttctagctttaatttatcattatttaattttaataaccaaggagatgataacgtcattctttagtacgctgtaatccattcccttttcatcaaattcaaattataattgtaatgcttcttctacagatttatattccatttcaaatgcctctgcaacgcctttattggttacgtgacctttgtaagtatttaaacctaatgataatggttgatttgatttaaatgcttctctataccctttattagctagcatgagcgcataaggtagcgtagcattatttaaagctaacgtcgaagtacgcggtactgcacctggcatatttgcaactgcataatgaaccacaccatgcttaatatatgtaggatcatcatgtgtcgtaattttatcagttgtttcaaaaataccgccttgatcaatagcaatgtcaataataactgacccatttttcatttgtttaatcatgtcttctgttacaagtcttggcgctttagcacctggaattaaaactgcacctattactaaatcactttgtttaacatacaactcaatattcaacggatttgacataattgtatgtacacgtccaccgaataaatcatctaattgttgtaaacgctttggattaacatctaaaatcgtaacatctgcacctagtcctagtgcaattttagctgcatttgttcctgcttgaccaccaccgataatagttactttacccttaggtactcctgggacaccacctagtagaattcccataccaccattaagtttttgtaggaactctgcgccaacttgagctgacattcttcctgctacctcactcattggtgataacaatggtaaagatcggtctggtaactgcacagtctcatatgcaatactaattacttttctatctatcaaagcttgtgttaatttttcttcatttgctaaatgaagataagtgaataatacaagcccttctttaaaatatggatattcagattcaagtggttctttaactttaataaccatatccacatcccaaacttttgcttgttcagcaacaatctcagcacctgcttctttgtaatctacatcttcaaagaatgatcctgaacccgcatttgtttccactaaaacagtatgcccactttctactaaagcgtgcacaccacttggtgataaaccaacacgattttcattatttttaatctcccttggtataccaattttcataccatccacctccataatcatcttaacgcgaacattttgaaagcgcaatcaaaaatccacaaaattgtaaaggttattacactgacttttccgaaaattgtggtaaaatataattaagaaagaacaaggaggcacttactatgattacttacaaaaatattttaatcgcagttgacggttcacatgaagcggaatgggcatttaacagagcagttggtgttgctaaacgtaacgatgcgaagttaacaattgtgaatgtaattgattcaagaacgtattcttcttatgaagtttatgatgctcaatttactgaaaaatctaagcattttgcagaagaattattaaatggttataaagaagtagctactaacgctggtgttaaagatgtagaaacgcgtctagagtttggctctcctaaatctatcattcctaaaaagcttgcacatgaaattaatgcagacttgattatgagtggtacatcaggcttaaatgccgtggaaagatttattgttggttctgtatcagaatctatcgttcgtcatgcgccatgtgacgtgttagttgttcgtactgaagagttaccagcagacttccaaccacaagttgcaacaactcaattacgtgaaaaatatcaaaattaaatatagatgatcattagataactacttgatcattatgaaccaagtgcaactttctgcacttggttttttattgtttataaataaaactcacttaataatgttttcataatcttcttcgactacttaattctttaagatattcgtgaaaagagacattacactagttaattttcaaacaatacaaaaagcgtctacctcctacatataattgtagcggagatagacgcttaatatttatttaaaaattattttaaaccaccgaatgtcataacatcacgggcaatcatactttcttcatctgttggaataacgacaactttaactggtgaatgaggatagttaataaatccttctttaccacgtagtaagttttcatttttcttaggatcccagtaaacacccataaattctaagccttcaagaactttcgcacgaatttctactgagttttcaccgatacctgctgtaaatacgataacatcaacaccatgcattctcgcagcatatgatccaatatatttgtgaattttagaagcaaatacatctaaagccatttgtgaacgtgctttacctgattcagcttcttctgataagtcacgtaaatcactagatgtacctgataatcctaataaacctgattctttgtttaagatttccaatacttgttcagcagttttacctgttttttccataataaatggaattaaagcagggtcaatattaccagaacgagtacccattgttacaccagcaagtggtgtgaagcccattgatgtatcaatagatttaccgccatcgatagctgcaattgatgctccattaccaatgtgacatgaaataatacgtaaatcttcaattggcttatctaacatttctgccgctctttgtgatacaaatttatggcttgtaccatggaaaccatacttacgaatgccataatctttataataatgatatggcaagctatatagatatgctttttcaggcattgtttgatggaatgctgtatcaaaaattgccacatgagggatatttggtaataatttacggaaagcacgaatacccatcaagttagctgggttgtgaagcggtgctaattcgcttaattcttcaatttccttttcaacctcatcagtaatagctactgattcagggaatttttcaccaccatgtacaacacggtgacctgttccatcgatatcgttaatatcattaataatattgtgcgctttaaaagcatccaacatgatatcaactgcctcaacgtgatccttgatatcttgtactgttttaactttttccccgttgacttcaattgtaaaaattgaatccttcaatccgattctttctactaaaccttttgttactaattcctcttcaggcattctaattaattgaaattttaatgatgaactaccagcattgatagccaagattaattttgacataagtaatgatcctccatcgtttgctttttatactatttcatttttcattttatcattcatacagttttatgactatactattacagattattttttaggacgatttgtgtccatccactgatttaactctgtcataaatccttgaaattgtgaaggaattttgaaatcaggaatatttgccaataatacttcaactggctttgtttcacccgattttttcttttgtaaaattaatatagattttcgcgctttttcatttttaaataaagttggtggtaaatttaaaaatgcttgcatctctgtctctgttgcaatatatttttcaagctgttttacatgttcacctgtaaaaatattacttggtaccactagaaaggcatatccagcatcttttaatgcatttattgcttgttctattaataaataatgtgaataactatgtccttcttcaaaacctagcttaaactccttacttctttcatcaattggataatagcctactggaaaatcaccaataacgatatctgcttcttctaatggtagtggcatgatggcatcttgaggatacacatcgaaaggaatttctaagaagtttgctaaatgtacactaacacgtgataaaactggatcaacttcaattaaatgatgcataaccgcaatttcaggtaacacttcttttacagtagcacttaaatgaccggcaccacttgcaatatcaacaatatgtaattcttcttggttgttcataaaacgctcaactaaaaatcctagtatcaatccaattgaatctggtgtaatttgatgatttgcttgtatcttttcttcctgcattaaacttaaatatgcaaattggaatgctttacgtcgatcttgtaacgtcgattgttctaacaatcctctttcattggtatatacttgttccattgctagcccaagattttcaataaaactttggccattttcattatttaatgttttagctttttcatctaatgtatgaaacaagcgttccataattgtttgttgttctgccatattcgtccctctccaataaaaagtgcccataggtcttagcaatcatagaaaacaattctattttaatgctgttgacaacgatggacacgatgtatacattttaagatttatctctttaatgattaaatatttttgtatgcagctaaagcagcatcaaaatctgggaaatcagtaccttcactaacgatttctttataaacaactttattatctgcatctaatacaaatactgcacgagctaataagcgaagttcttccataacaacgccatagttttcaccaaatgataagtcacggtggtcacttaatgtaatgacattgtctaaacctgctgaagcgcaccatcttttttgtgcgaatggtaagtctgctgaaattgtaagcacaatcccctcttctttagaagcatcagagttgaatttgcgagtctgctgatcacaaacacctgtatcaattgatggtaccacactaattaatttctttttaccagcataatctgctaatgttacttgatttaagtcattatctaacactgtaaaatcaggtgcaaaatcaccttcattaatttgttgaccttttaagtggattggtccacctttgaatgttatttcagtcatatacttgacctcctgcattttaaaattctaactacatcatacgacaatttatggtttgattacaattttcatgctttaatcaaaagcaaatttaattttatacaaattgttgaatataatcaaaagcattttttaaaattaaaatagcagtaataataataaataatacttttacatagccaacaccttgtttgatagcaaaatgtgccccagtatatgacccagcaatcatgcttgtagccattattaaacctattacataatctacttgtcctaataccataaataatacaagcgcacctatattagaagcaaagttcaaaactttagcatttcctgctgcacttaaaaaatcaaaaccaaagactaacaatacaaaaagcataaatgaacctgttcccccacctacaaatccatcataaaagccgattaatataaaaagtgctgcaaatagtatggctttcttaaatgtaaattgagtaaacgtacgtgtattgccccaatcttttttaagtaatgtgaatataaacaccgacgaaagtgcaataatgattaaaggtttcaatatttgtgacggaaccatcgttgcaatatatgcgccacatgcagatgccaaaaatacaaaaccaaataatttggcaacaacatataagtccactttaccggaccttataaactttatcgtactagttaaagaaccaaatgaacttgccaatttatttgtacctaaagccacagatggtggtagaccgattgctaataatgctggcgtagaaattaaaccgccaccccctacaaccgaatctataaacgccgcgataaaaccaaataaaattatgattataatcatcgttaagttcaaatccatagtttaacatccccttatgtttaaatttactctaggattttatttataaaaagtcatttattaattggtttgtttgctgttctttaatagttttataatcactagttatttcaagtgtttcaatattttcaacagcacgattaatcatctcttcaaaatcaaagacgctttcatattgaactaccttatcaaagtttggttcggttactggatttttaggggtgaaaattgtacaacaatcttcaaatggttgaatagatgtttcaaatgtaccaatttctttcgatttaataataatttcttctttatcgtaagttaataaaggacgtaatacaggagtagaagttacattattaattgcatacatgctatgaagtgtttgactggctacctgccctaggttttcaccatttacaatagctaaagcccctatttgatgtactaatttatcagcaacacgcatcatcatacgtctcgttgaagtcattgtatatcttggatgtacaactttatttacctgtttttgcaattctgtaaatggtacaatatgcaatttaattggtccaacacgttcagctaaaatacgtgtcaattcaataactttttcttttgcttgatcacttgtaaatggtggactatggaaatgaatcgcttcaattgttacgccacgtctcatcacttccatcccagcaactggtgagtctataccgcctgaaagcattagtaacgtcttaccaccagtaccaactggtaatccacctgaacccggaacaacttcttcatacatataaattgcatctaatctaacttccactcgaatttcatgatctggacgtttgacattcactgaaatattgtcgaagtgcttcaatattgcaccacccaattcacgctgtaattcatacgtatccattgggaaatttttatcggcacgcttcacatcaattttaaatgtgctgttttcttcaaattgctgcgcaaatttaattgccgctgcactcattgcctctattgttttttctacttttaatactggactaatagatttaataccgaaaatttttgataatcgatatgttatttcatttatatctgcatggtcttcaagttcaatatacatacgatctcgtttgcctttaacgacaaacccatcaagtccttttaatgacttatttacattatttcttaattgatttacaaatttttttctatttgaaccctttaatgttaactccccgtatctaacaagcaagtgatcatacttcattattttagcaactccttaatttcctcataaatgatgataaatatttctttaaaccttgctatatcttctttagttgtagtagccccaaatgataatcttatactaccttcaatagatttgtctgataatcccattgcagccaatacttcatttaatttattacgtttagatgaacaagcactcgtcgtagatatcataatgtcatattttgaaaaagcattaactaatacttcaccttttacgccaggaaaactaatatttaaaacgaatggtgaaccagaagttgaagaattaatataaactccatgatatttatttaaaaattgacggacgtcattatttaacacagtaacaaatgcattcaatgcttcaaagttttcattagctatcttcatcgctttaaccattgcaatatcatttggcaaattaactgttccacttctaacgccatattcttgaccaccaccatggacagttggttcaacattttgaatgtgatttacaagtaagacgccttggccttttaaaccattaaacttgtgtccacttaaactaatactatctatgttattgagatccattgaaattttgccgaatgcttgaaccgcatctacatgaaaatgtgccttaggataattttttataactttagccatttgtggaataggctgtatttgtccagttacattatttacatacatacatgttactaaaccgactttgtctgacattaattctttgaagtgttctaagttaatactgccatctttctttacatcaacatatttaactttaaatccttcgtgtgcttccaaatatcttacaacctctaatacggacggatgctctaacacggatgtaattatttccttcgctgtatcaaatttacgataggcaataccttttaaagcaagattattggattcagttgcaccactagtgaatacaacatcataatttgtttttgaattaatcattgcattaatttgggcttttgcttgttgtagtaattgatttgcctgcaaaccagctttatgcggactattcggattataatacattgattgatttacttttaaataagtatctaacacttcttcaaatgctttcgtcgttgccgcattatctagatatatcaaaataaacacttctctttcattaatcatcaatcgttaaaattgttttactcaagcattatactattatccgacaaaaaataaaggttatagcgcaaaataatcttatttctacttattaaataaaaattagactatttcactctatttaaacagctgtgtgattatgcttttttcactacttatattaattaaaacaacacatttgattacgtttatctttaaacaattgctatttatatttattgtccctttcatttatccatataaaaaagaagctagacaacgtatcgttggctaacttcaattattaaactcatcagtccaatttgacagagtgctcatattatttaagtataactacatactagtttctattgcttaataacttcttcttcaatatgtttagtaacacctggctcaacactttcaagagcttgctctgcaatttcaatcgcacgcttatagcgattatttttaaataatcgttcagcttcatttaagctcttatcaacattgctatagtccttacgatatctatttccatattgaattaatttctctgcataaacagcattaacaagaacatcatttgcttcatcttcaaatgtattcatttgaatcacaattttagacactttatcttttaactgtttaacgtgtattggacgttcactaaattgttcgttaacatcacgaacttcatgatcaatttcatttttcatgatgataaacctttcaggaacgcttgttaagttagaagcaagtaatcgacgatacacttcttctttcttcgattggactcgtagcagattgtcttctgcttctgcttcatcttcacgcaattgaatcagatgattttgtagcttttcttgtttgtcattaataactgtgacatgatcttctaaatattgtaaattatcctgaacctcgctatatcgcacagcagatttagacatttcttttaaaatatcatcatatacagaaattaaactttgaatttcattttcaaattgacgaacactttgagcatcagattcatttatatagtagttttcacgtacatattcaatttctgtttgcaatgtataattcatgtctttagctttgaataagttatccgtaatgatatcttttgtttcttcgacatcatttttagctttaacttcatgttcaattaaatcatacatgtcatctaacttatcattgatattagctagtttatcattagcttcttctaattctaagcggctaattaatggttcaacgaaactaagctctgtttttaagctttgtaatgtactgtctacttttacgtgatccagatcatacccttcaactttaagatcacggcaaccatattttaaatcttggaattgaccaggtaattctttttgagtttctctaattaattctggtatttcttccatataagatcttagctgtttcatttgttcattcaaggcagctatatggttgtgcgcttgtacataattaccatcagcttttagtacttcatattgctctaaccttggctcaaacttttcaatttcagtttcaagtagacttgctgcctcaccaaattgatgacgatttgctaaaacatcacgtttcatttcacgataatcaaccttacatttgtcatataattcatcattatctttgtataacgcaataatttcatttacatcttctaattgttgctgatagctttgttcgtaactatccatcaactcatttgcatcatcaatttcactttgagatgcgttgaaactaaatttatctaataaagcctcagcattatggattttttcttccacaggagctagatacttatttgtactttctacgttgtcctttttcattgcatcgtatttcgtttttgtttcaccttttaaattcaacttagataattgtgcaaggttttgatcaaaaggtaacgtctcaatttcatttttacgttcgattgctttttcaataatttgtcgtttatttgaacgtaaatagaataatacacctacagcaatcaatataatcacaattattgccaaaatgatatataacaccatatgcttctcctcctaatttatcattactattataacgtaattttgcttaaggataaattataaaatgaatttattgccataatattttcgaaattctatactattataaaatctatgaaaataagaggttttaaatatgacaacaattaacccaacaaactacacattattaaagaaacaagcagcaagccttattgaagatgaacatcatatgattgctattttaagtaacatgtctgccttattaaatgataatctagatcaaattaattgggtcggcttttacttattggaacaaaatgaacttatacttggacctttccaaggacaccccgcttgtgtccacattccaattggaaaaggtgtatgtggtacagccgtttcagaacgtcgtacacaagttgtagctgatgtccatcaattcgaaggacatatcgcttgtgatgctaatagtaagtctgagattgtcgttccaattttcaaagatgataaaattatcggcgtcttagatatcgatgcccctataactgatcgatttgatgacaatgacaaagaacatcttgaagcaattgttaaaattattgaaaagcaactcgcataaaaggtcatcagcattttcaataaagtgttgacagttagcaggaaaatgttacaataatctttgtgtgaattaacgaaagtagcagttgtatattattgagcgctatgttgttcccaatgcggacgtgtcacgtaactgtcgctataaggtgaagacacataaaacaatatatcttagtaagcatgcaacactcttttttgtttattcataacaacaaaaaagaattaaaggaggagtcttattatggctcgattcagaggttcaaactggaaaaaatctcgtcgtttaggtatctctttaagcggtactggtaaagaattagaaaaacgtccttacgcaccaggacaacatggtccaaaccaacgtaaaaaattatcagaatatggtttacaattacgtgaaaaacaaaaattacgttacttatatggaatgactgaaagacaattccgtaacacatttgacatcgctggtaaaaaattcggtgtacacggtgaaaacttcatgatcttattagcaagtcgtttagacgctgttgtttattcattaggtttagctcgtactcgtcgtcaagcacgtcaattagttaaccacggtcatatcttagtagatggtaaacgtgttgatattccatcttattctgttaaacctggtcaaacaatttcagttcgtgaaaaatctcaaaaattaaacatcatcgttgaatcagttgaaatcaacaatttcgtacctgagtacttaaactttgatgctgacagcttaactggtactttcgtacgtttaccagaacgtagcgaattacctgctgaaattaacgaacaattaatcgttgagtactactcaagataatacgttcaatacaaacacccacaattgtgggtgttttttttattaatttaaaaatgatagattcaaaattatatggagctaccctattttacaatcaacttagaatttacaagtcttatttgtttaattatctttagtatttcatcattagtttttaaaattatcaattgcgatatacgaatcctcatccctctatcaaattaccattcatcgtctcacttaataaataatttcggattatctgtaattaatccatctacacccatttgtcttaatttttctccagttttcaatttattaactgtgtatggcataacctgtaattgatgatgatgtgctttatcaacaaattttctggtcactaatgcataattaggattaacataactagcaatttgagcaattcttgaaaagtttggctttttataccaataattacgtttactacaaagcacacctaattcatatatactgcccaatgtgtttaacttttcgatgcattcgatatcaaaagattgtataactacttgtgtcgcatcgactttcttttcttccaaaaatgccagcaatttacattctatttctggatataaattcggacttttcaattcaatcaatagctttttatcatactttaagcataatgaaagtacttcatctaacgtgggtattcgttctcccttaaaagcaacatctttataactaccaaaatcaaatgattttaattgcgataatgtgtaatcagaaatacgccccttaccatccgatgttctatcaattgtttcatcatgtatcacaacaaaatgttggtctttggtcaaatgaacatctatttctaacatagcaacattgagccccattacctctcgataaccgaccattgtattttcaggaaaatcactcggcaatccacggtgcgaaacaatttgtaattcatctttcagtttattcagagtcattgataagtcacctttctgttaaactttgataaactattctaaaattaaactatcacaattatattggaggttaaagcaattgcatcaacatgactttaaagtccaaacttcttggcaaggtggtcgtaacaatgtcggaaacgttcaaggcgacatactttcagagaatatttctatacctgcttccttaggtggtgttggtttaggaacaaatcccgatgaattgttagtatcagccgcttcatcatgttatatcatctcattagcagctactcttgaacgtgcaaagttcacagatatttcaattgaacaacaatcgattggaacagcttgtttaaataacggaaaattcagtatgtcaaaaattgtgcaccatcctcaaattcaaattccaagtgatcaaatagcacaattagaaaagcgattaccaaaattgataacaattgcagataataattgcatgatttcaaatgctgtaagaaataatgtggacataaaaatttatcccatcattcaggccaaataaaatctttaagtgataacgtttgttcgacaatatagcgttatcacttttttaggcttttaaattttcagaaaatttgctaaaatagtgaaatcttatttataggaggcatataaatgtattatcatcaaccgttgttattaacacctggcccaacccctgtacctgatgccattatgagagaaattcaagcacctatggttggtcatcgttctaaagattttgaagacatcgcacaacaagcatttcaaggtctaaagccaatatttgggagtcaaaatgatgtacttattttaacatctagcggtacaagcgtcttggaggctagtatgttgaacattgtaaaccctgaagatcacttcgttgtcattgtttcaggtgcctttggtaaccgatttaaacaaattgcacaaacttattacaaaaatgtgcatatttatgacgtaacatggggagaagctgtagatgtcaaagatttcatcaatttcctttcaactttaaatgttgaagtgaaagcagtatttagtcaatattgcgaaacatctacgacagtgctacaccctattcacgagttaggaaatgccatcaatcaatttaatagtaatatttattttgtagttgacggcgtaagttgcattggtgctgttgatgttgacattaacaaagataaaattgatgtacttgtttctggtagtcaaaaagcaattatgttacctccaggattagcttttgtagcttatagccaccgtgcaaaagaacgtttcaaagaagtaactacgccaaaattttatctagacttaaataaatacatttcgtcacaagctgacaattctacaccgttcacaccaaatgtgtctttatttagaggtgtaaatgcatacgttgaaaccgtaaaagcagaaggtttcaatcacgtaatagcacgacactatgcaattagaaatgcattaagaagcgccttaaaagcattagatttaactttattagtcaatgataaagatgcatctccaacggttacagcattcaaacctaatacaaatgatgaagtgaaaataatcaaagatgaacttaaaaatcggtttaaaataacaattgctggtggtcaaggccatcttaaaggtcaaattttaagaattggtcatatggggaaaattagtcctttcgatattttatcggtagtatctgctttagaaattattttaactgaacaccgtaaagttaactatatcggtaaaggtatatcaaaatatatggaggttattcatgaagcaatttaatgtactcgttgcagatcccatatcaaaagatggtatcaaagcattattagatcacgaacaattcaatgtagatattcaaactggcttgtccgaagaagcattaatcaaaattataccttcataccatgctttaatcgttcgtagtcaaactacggttactgaaaatatcataaatgctgctgattctttaaaagtaatcgcacgcgccggtgttggtgtagataatattaatattaatgctgcaacattaaaaggtattttagttattaatgccccagatggtaatacgatttcagctactgaacatacactggcaatgttattatcaatggcacgaaatattccgcaagcacaccaatcacttacaaataaagaatggaatcgaaatgcatttaaaggtactgagctttatcataaaacattaggtgtcattggtgctggtagaattggtttaggtgttgctaaacgtgcgcaaagtttcggaatgaaaatactagcttttgacccttacttaacggatgaaaaagcaaaatctttaagcattacgaaggcaacagttgatgagattgcccaacattctgatttcgttacattacatacaccactaacacctaaaacaaaaggcttaattaatgctgacttttttgccaaagcaaaacctagtttgcaaataatcaatgtggcacgtggtggtattattgatgaaaaggcgctaataaaagcattagacgaaggacaaattagtcgggcagctatcgatgtgtttgaacatgaacctgcaactgactcgcctcttgttgcacatgataaaattattgttacacctcatttgggtgcttcaacagtcgaagctcaagaaaaagtggcaatttctgtttcaaatgaaatcatcgaaattttaattgatggtactgtaacgcatgcagtgaatgcacctaaaatggacttaagcaatatagatgatactgtaaaatcattcatcaatttaagccaaacagttggtgaattagctattcaattaatgtacaatgcaccaagctctattaaaattacgtacggtggcgacttagcctctattgatagtagtttattaacacgtacaattattactcatattttaaaagatgatcttggtcctgaagtcaatattatcaatgctctaatgttgttaaatcaacaacaagtgacattaaatattgaaaataataaagcagagacaggttttagtaactacttagaggtagaactatcaaacgatagcgattccgttaaagttggcgcttctgtctttacaggtttcggtccaagaattgttagaattaataatttttctgtagacttaaagccaaatcaatatcaaattgtgtcatatcataatgatactccaggtatggtaggaaaaactggcgcattgttaggtaaatacaatatcaacattgcatctatgactttaggtagaactgaagcgggcggagatgcgctaatgattttatccgttgatcaacctgtttcaaacaatataattgatgaacttaaacaagttggtgaatacaatcaaattttcacaactgaattgacggtacagtcataaacaatttatgtaaattcaaaatgccaagaagacattggattacttccattgcttcttggcattttttcattattaatttcattgtaactcaatatgaaacctttggttcaatcattcacttcaagttgtgctgtcaaacaacaatcaaattacaaattatctagtacacctctaagttcacctaaatgattaataacatagtcggcatgatgcgcttctaactcacctgcagcatccttaccttttaaacctgttaatgttccaataaacgttgcacctattttttgagcacttaataagtcagctaacgaatcgcctactataaatacgtcatctttatttacaatgttatcttgcttattgatataagattcatatttatcgcgattattaccatataaagctgcgatataactaaaaggattcggctttcctaatggtcgtgcttgcggatacatattctctgcttctaaaacatcacttgctgttgcaataaaatcagcttcaaaatatggtaacaatcctaaattttcaaatggcacaacagtctcagtataaggacgacctgttgcaatacctaattcgaaaccagcaccttttaaatcattcagaagtaccttaacttcatctactggtctcaaaataatttcttgataaatataacctgtcttaaaagtagttcgtgctattttcttttcaacatcttcatacaacttcgatcctaaataccattcttgataaacttcttgcgctaacgtccataatgcacccttcaaactaaataaagtagcatccgaaacatgtaactctgttgttgcaaactcttccaaagcagcataaatattatttttaccaacttttacattatccaaaaattgtaaaggtagttgttcatttaaattaaaacagtctgctaagtttgtgcttatattttgcaacttcaattcgacaggctcatcttgatacatgaatgcctcaatttcatcatgtgataactttttcaaaatatcaattaaatgaatactaaaaacgataaataacatatcccaatttgaatttagccctagcgattttaatttgtttaaaatcttatctttttgaaaaattcgattcctaatgtcttgtatatcgttatcagtcaaagtttcccaatctatatgtgaatgaagacctaaataacacttatccattaataattcatataccgttaatgcagagacatcgaaacaacgttcttcacttaaaaaaacgccatcaacatcaaataaaattttcttcacaatccccactccatttctgaaaattcagatataaatcattctactatttgactaaaaaaagcgcaaaccctattgaagttggatttgcgctttagctgtttaaattttataaatgtttttcaatttcatcagcaacctgctgtacgtgtgtaccgacaataacttgagttgaatgtttaccattaacagtaacaccaactgcaccggcgtttttaatcttctgttgatcaataatagatgtgtcttttaactctagacgcaaccttgttgcacaattagttaaattaacaatattctcttgaccacctaaaccttctaatatttgtatagcatgttgatgatatttactttgtttaatatcattttcaccaggagcaatattatcttttacaactgttggatcaactaattcattttcacctctaccaatcgtattcaagttaaatacttggattactacacggaaaatcacatagtataagatgaaaaatacaacaccttgaacaagcaacatcaatggatgatttgataccggattaattagtgataacacataatctatcaaacctgcactaaatgaaaatccagctgtccaatggaatgtagctgcgataaataaagataatcctgttaataacgcatgaacaacatataagattggcgcaacaaacataaatgcaaactcaatcggctctgtaacaccaacgaaaaatgctgcaactgaactcgctaggaaccaaccgtaaacttgttttttctgagtcgttttagctgtatgatacattgctaacgcagccgctggaataccgaacatcatgattgggaagaatcccgcttgatagcgtcctgtaataccttttatagcatctttgccactttggaatttaccaatatcattaataccaatcgtatcaaaccagaacacactattcagtgcatgatgtaatcctgtaggaattaatagtctgttagcaacaccatatatgaaagcaccaaacgatcctaaaccaactatagattcaccaaattttacaatccatgaataaagtagtggccataagaataacaatatgacaactaaaaatgtacagtaaaatgcagtcataattggaactagacgtttaccactaaaaaatgataatgctaatggtaattctatttcactaaacttattgtatgcataagctgctattaaacctattacaataccaacaaagacattgccattattcatcttttcaaaagctgaatttatttccgaagctttcattcctaataaaggcgctaatttcattggtgataatacaactgtaactaaaaaatatcctaacgtagctgcaagcgcgactgcaccatcatttttctttgccattcctatagctacaccaattgcaaataaaatacctaattgctctaaaatcgtagtacctaccgtagtaaagaacattgcgattttcggcgtcgcatgaagtgcatttaacgtattaccaattccggcaataattgctgcagccggtaaaatggcaactggtaacattaacgaacgccctaaattttggaaaaatttatacattgaatgtcatccttcttaaaataaggtagaaatataaagattactaatgtaactagaataactacttcgatactccgttatagtcacctaggcttactaaccagctatatttctacctcaagttattttataaactttttacaatttcatgcaattcttgttgtaactttgctgttcgtgtttcaatctcttttgtaatataatcgatacgctcgtttcgttttaaatctttaggtaaatcgttaatatcgattggtttaccaatatttatgtatgcttgtcctgttaaaagaccgtgaatcttagtaggaccaacataagcaacaggtaatattggtgacttacttaacattgcaattgttgaagcaccacgtttcaaaggtgcaccttcttgcgatgtgcgagaacctgttgggaagataccaactgtcttattatctttcaacaaattgattgggcgttttaaagtactaggtcctggattttcacgatctacaggaaatgcatttaaagacgttaaaaatttaccaatccatttatttttgaataattcttttttagccatataatgaatttgattaggatataatgccatacctagcataatgacttcgttataactttcatgcgtacaagttacgacatatttactatccttaggaatattatctttaccgattacgtataatgattttgacattttaactaaaatgaaattcaaaatcttactaatcactgaatacattgtgccacctacttaacttatttgtttataacaactagattttatcactatatttttactagaacaagatagtctgaaaatacatctaaagttgtatagtgtattactagcaataattataaaaaaaagacataattaaagcatatataaatcatataatggaggttaagtatgtcagattttaatcatacagatcattctacaacaaaccatagccaaacacctagatacagaagacctaaatttccatggtttaaaacagtcatcgttgcattgattgctggaattattggtgcacttctagtacttggtataggcaaagtattaaatagtacaattttaaataaagatggttcaactgttcagacaacaaataataaaggtggcaatcaattagacggtcaaagcaagaaattcggtaccgttcatgaaatgataaaatctgtctcccctacaattgttggagttattaacatgcaaaaagcatcaagtgtagacgacttattaaaaggcaaatcatctaaaccatctgaagctggagtaggttcaggtgttatctatcaaataaacaacaattcagcttatatcgttacaaacaatcatgttattgatggcgcaaatgaaattagagtccaattacataataaaaaacaagttaaagcgaaattagttggtaaagatgcagtaactgatattgctgtacttaaaattgaaaatacaaaaggtattaaagcgattcaattcgccaactcttcaaaagtacaaactggcgatagcgtattcgcaatgggtaacccattaggattacaatttgctaactctgtaacatctggtatcatttcagcaagcgaacgtactattgacgctgagacaactggtggcaatacaaaagtcagcgttcttcaaacagatgctgctattaacccaggtaactcaggtggcgcattagtagatattaatggtaatttagttggtattaactcaatgaaaattgctgcgacacaagttgaaggtatcgggtttgctattccaagtaatgaagttaaagtaacaattgaacaacttgtaaaacatggtaaaattgaccgcccttcgattggtattggtttaattaatttgaaagatattcctgaagaagagcgcgagcaacttcatactgatagagaagacggtatttatgtcgccaaagctgatagtgatattgatcttaaaaaaggtgatattattacagaaattgatggcaagaaaattaaagatgatgttgatttaagaagctatttatatgaaaataaaaaacctggtgaatcagtcactgttaccgttatccgtgatggtaaaacaaaagaagttaaagtgaaattaaaacaacaaaaagaacaaccaaaacgtcaaagccgatcagaacgtcaatcacctggccaaggcgatagagatttctttagataatttacagacagaaaagtacattaagagcctactcattacattcttaggaatgaatatgagtaggctctaatttatttagctatgcaattatatttattgatagttaaccatgaagtattttttcttaccgcgacgaataatcgtaaattcgccatcaattttatcttctggtgctaaagcataattaacatcttgttgtctctcaccattaatataaatcgcaccattgttaacatcttcacgtgcttgtcgtttagaaggagaaatgcctgtttcaataaggacttcaacgatatttgttgtgtcatttgataatgtcacttgaggcacatctttaaatccatcttttaattctttcgctgataatgattttaaatcaccactaaataatgcttgtgaaatacggattgcatcatttaatgcatcttcaccatgaataaatttagttacttcttcagctaatgttttttgagcttcacgtaaatgcggtgcttcatttttagattgttctaagcgatcaatttcttcttttcctaagaaagtaaagtattttaagaatttaattacatcttcgtctgattgattaatccagaattgataaaattcataaggacttgttttttcagcatctaaccaaacagcacctgactcagacttaccaaatttcttaccatctgatttagttacaagcggaatagttaaaccgtatgcgtctgtttgaccatacatacgacgcattaattcaataccacttgtgatattaccccattgatctgatccacctacttgaatcttacaattcaattctctattcaaatgaccgaaatcaatagcttgtaaaatcgtgtatgtgaattctgtatatgaaataccatgttctaaacgactttggattgaatctttacctaacatgtaattaacgccgacgtgtttaccatagtcacgtaaaaagctaattaatgagatttgtcctaaccagtctctattattaacaagcactgcaccatggtctgttccaaattcaaaaatattgtgcatttgcttactaataccttcgatatttttatctacttgttcttctgtttgtagcacacgttcttctgatttacctgatggatcaccaatcatacctgtaccaccgccaattaaaacgataggacgatgtccatgttcttgaaaacgtcttaatgttaagaatggtagtaagtgaccaatatgtaaactatctgccgttggatcggcaccgcagtataacgtcacttgttctttatttaataaatcttcaataccttgttcatcagtttgttgataaataagacctctccattttaaatcttcaattaatacattcgtcattattatttcctcctatttataattatttattgaatacttgttaaaatactttaaagttttttgaacgtaaaaaaaacccttacaacaaatatgtaagggcgcgattgcacgttaccaccaaacttaaacataatcataagataatgttcactctattaatgatacgttcattaataaacgtaggacatgttagttataaaggtgtattcatattattaaaaacactagttcacagcgaccactagctctctgatgatttcaaataatattacttgtccttttatcctattctttatgcattttccctaattataattaacgttaaaataaaagtcaaattgcttaaatatggtatactatacgtaatttaggaggttaaagatgacgaatcaagacaacaatcatcaattgaatcatcgtatatatcattttgaaaagatatataaagctatcaaacatgtcattgtttttatatttatgattttcattgccatcgttgctatcgctgtgattgcgatgtctttatattttcatcatttaactaaaacgtccgactcattatcagatgatgctttaataaaaaaagttcgacaaatacctggcgatgaattattagatcataataacaaaaatttattatatgagtataaccattctcaaaactcactcattataggccctaaaacatcaagtccaaatgtcattaaagcattaacgtcatctgaagacactttattttataaacatgatggcatcttaccaaaggcgattttaagagcaatgatacaagatatttttaatactgatcaaagttcaggtggtagcacaattacacaacaacttgttaaaaatcaagttcttaccaacgaaaaaacatatagtagaaaagcaaatgaacttcgcctagcaattagattagaacacctactctcaaaagatgaaattatatatacatatttaaatatagttcccttcggtagagattataatggcgctaatatttccggaattgcatccgcttcatatagtttgtttggtattccaccaaaagatttatcaattgcacaatctgcataccttatcggtttgttgcaaagcccttatggctatacaccctacgaaaaagatggaacattaaaatcggataaagatttgaaatatagtatccaaagacaacattatgtattaaagcgtatgttaatcgaagatcaaatcactgaaaaagaatacaacgacgcattaaaatatgatattaaatcacatttgttaaatcgaaaaaagcgttaattgatgctcactttttaaagtaaccacaacaatgaatccaaatattaaaaacagcagtaagattattttcaattagaaaatttctcactgctgttctttttatttactctaaaggaaagccattaaaccaatcaatagtttataatttaattggtttcacattgtctacaaagttaatcatacatatgctatatccagttaattatttagattcttttctgaatttaggaatgaataaagctaacatacctaataacgcatataagccccaccatgattggcttgaagttgtttctccagtttttggtagcattttagattgactaagtttgttttctttcgatggtgtgccggctttttcttttgttttcactgttttatctacagttttatgaatatcactcggcagatgttcagttgtttttttgtcagtaactttgtctgtattattataattttgtttcactacgtcaagctttgctgcttttccattatgattatttttatcggcaatatgattcagctgtatgactttgtctttatttttattagagtctttatcagtatcgacattcgatgacataccaacgctattatcggcacctttatccacatttctatcagtatctttggcaatttgagtatccatttcttttaaatcatacttatcgaagtgattattatccgacatatcggataaatgatcaacatcatgttgcacatctttatcaatattattatcagcatctttaaccacgtcagaatctggttctatcacatctgctttatcagacgcatctttaggatttgttgcagtgctgctattttcagctacatctgtatcagcaaccttaccttcttgtcctgtttgtacatttagcggttcactcgtgttattttgtgatgtatcatcatcttttgtattgatatcctgatttataattctgacatgatattgaccttcataaccaatgtttgccacaacgactttaacaatcgcattgtaaactgctttgtcaggtatatatgggaaaatcaacgttctagaattatttttaggatctttagaaacagtagtgacacgtttaccttctacaattaaatctttccagtaactgtcatcctttgttttcatcactacatatttttgaccatttaaagttgctgtatagaatggatgttcaacaaagccgtccataactgactcactattttcttcactttcaaaaacaacaaaatgcgcttcttgtacatctgttaattgatcatttgtaggtgtaacattttcaaattccgtcactgctgatttaacctgatcagctaactctactctagtttgatctaatttctttttatattccgccttatatttttccggcaatttctcttgtaatttttctaattcataaacttgtctttctaacgttttagctttgtgatacggagctaataatttttgtaaattgtatgtttcctcatccacatagtcgtctgggttattagtaataggctgtgcaaagaccattagcgtataatcatagtcttcatggatgttctcaccatattcaatagatgacacaattttaacttctctcgtaccattagatactgggaaacgaatataggcataatctttatcagaatcatatgatactaattcgactggtaactttttgtcaccttcataaacttcaaatttcttccatgttgaagcagtctttaaacctaattcaattattggtcctgtttttgtaaaaatgacagttgctggttcaacagtactagcataatgatagaactgtctttcacctttatcatttttcatttgaaaatcaattggtcgccaattatcagctgtatgttctttatcgatgatagccgggtttttaattgcatcttgtagtgattcatctgctggtggatactgttgattaacatccgactgattacttgactcattcgttttatcgttagtattaccattagaatttgtttcatgagctggttggcttgacgcttgatctgcattcgctgacgattttggttgtgcaggttgactcatatttgtcgttgcctgcggttgattattagcattgttgatcgttgatgtattttgattagatgtattcgtgtttgtttgattacttgcgtctgaacttgattgatcattcgttactactgcatcatttgtatctgatttcacaagtgaaggatcgttataaataggtttagcaaatactaatttagtataatcataatttgtttcttctccatcatcaatttgagtcgaagaaacaattttcaattcttgtgtgccatctgaaactgggaatcgaatataggcatggtcttctggtacaggactatatgatacaagtctcactggtaatttttgattgttttcatagacttcaaactttttccatgttgaagcagtattgatgtctaattcaacttctgctttctttttagtgtaatacacatctgctggatctttgatgctgaaaaagtgatagtattgcgtttcattgtttttatctaataattggaaattgacttgttctcttggacctatatcatgttctttattttctaatgcaggatctttaattgcatctttaagtgattcatccgctgcaggataggttttcgcagtgtttgctggttgcgtagcaggttgtgtttgatttgtatcctttggtggctgagttgtagttgcattattattttgattttccgagattttatctgaagtatttgtattttctgctgcttgtgcttgatgttgagaagtaattaaaaatagtgtactgacaatgaccgatgcaacgcctagaattgattttctaatagaatagaaagaccttaattttgggtgatgtttgttcatgttgttaacaactcctataagattatatttaattgataataattatcaatatcaattattagtgttaattgtagcgcatcccaattaaatattgcaacctattttattatttttttttaatatggaatattcattgcatcgctttcctattcttcaagcccactttttatcttcatatacattaattaaccaccttcaaacattgtcgttagattcgccaaattgaatctatttttagcacagcaaaaaaccgaactgctgaaataatgcatctccaacagtccggtctattaaactatttacttatctttattaaacaattgacatgatttattagaataacccaattgcatgaccatcatcagtaacatccatgtttaatgctgctggttttttaggtaaaccaggcatagtcatgattgcacctgtcaacgctacgataaatcctgcacctgttttcgcttctaattcacgaattgtaatttcaaatcctgatggtgcacctaacaacgtttgatcatctgagaatgaatattgtgttttcgccatacatactgggtaattatcccaaccattttctttaaattgttttaattgtttttgcgctttactgctaaacgttacttttgaaccgccatagatttcagtcacaatcttttcaatcttttgctctaatggtaattctaattcatataaaggtttaaatgaattaggttgatcaatgacttctaatacttcatttgctaagtcaacgccacctttaccacctttttcccaaacttcagttaaggcaattcgtacgttattttctttagcccaagattttacatattctacttctgcatcggtatcatgtataaatgcattaattgcaacaaccggttctacaccgaattttttaatattattaacatgacgctctaaattaacaattcctgcttttactgcttctacattttcttcttttaaattatctttcgctacaccaccatgcatttttaacgcacgaattgtcgcaacaacaacgacagctgccggatcaaatcctgcttcacgcgctttaatgtccatgaatttttcagcgcctaagtctgaaccaaatccagcttccgttacaacgatatcagctaaatcacgtgctgtttcagttgctaaaattgagttacaaccgtgtgcgatattcgcaaatggtccaccatgaactaatgctggtgtcccttcaattgattgtactaagtttggtttaattgcatcttttaaaatcattgcaagtgcaccttgcacttttaaatctgcaactgtaactggcttgcgatctctagtataaccaatagtaatacgactaattttatcttttaagtctttaatacttctacttaaacataaaatcgccataatttcagacgctactgtaatattaaagccatcttcacgtggtacaccatttgtaggtccacctaacccaacatttacatgtctaagtgcacgatcattcatatctaatacacgtttccattcaatacgtctttgatcgattcctaattcattaccttggtgaatatgattatctataaacgcagacaatgcattattagcagttgtaatcgcatggaaatccccattaaaatgtaagttgatatcttccataggtaagacttgcgcataaccaccaccagtcgcaccacctttaataccaaatgttggtcctaaagcaggctctcttaatgcaaccataacgtttttatttaactcatggaatgcatcagctaaaccaactgtaaccgttgatttaccttcaccagctggtgttgggctcatcgcagttactaaaacaactttccctttgttttctcttggcgtaattttattaatgtcgattttagctttgtaatgaccataaggttctaatgcatcctctgaaatacctactgatgcagcaatatccttaattggttgtagtgttgattgattcgcaatatctaaatctgataaatgagtcaacttttttcgcccctttttgtttaatttatgcatttataatatgtaagttgtagctaagaaatttttacttacattcatataataacgaactgttaaaaacttgtcgactaaatcgggttagcgctttcatttttgcaataaattcacttattaaagttttgtattatacaacttttagcgcttgatactattgataactatatttttctattatttaaaatagtcatattccaaagatcatattaaaaataaaaagcaatataaagatatgccattattgttatgtcatcattttcaaatgctttctacgaaatgatatgacacaagttaacagctctttatattgcttatcataaagtaaactaatatttaaacattaacatgaaatatgttgtatccctttattcttcgaaagaaatcttcaataacattcatgtcattattccattgtacttaaatcccctgcatctaaatttaattcccaagcttttaatacacgtctcataattttacctgagcgtgttttaggtaatttatctttaaattcgatttcacgtggtgctgcatgtgccgacaaaccttctttaacaaataaacgaatttcttcttttaattcgtctgttggttcatatccttttctcagtgcaacaaacgccttaattatttcaccgcgaaccggatcaggtttaccaataattcctgcttcggcaactgcttcgtgttcaaccaatttagactcaacctcaaatggtccaactcgttcaccagctgtcataattacatcatcaacacgtccttggaaccagaagtaaccatcttcatctttatatgccgaatcaccagatacataccagtctccaataaaatatgacttatatttttctggattcttccagatacgatacatcattgatggccagcctttttttatagcaaggttgcccattcgatttggtggtaattcattacctgcatcatcgataattgcagcttgaataccaggtaatggtttgcccattgagccaagcttgacgtccatcgttggatagttaacaatcatatgtccacctgtttctgtcatccaccaagtatctaacaccgttaaaccgtatacttttttcgcccattttataacttcaggatttaaaggctcacctactgatagaatcgaacgtaacgatgacaagtcatatttctcaacaatatcgtcaccagcactcattaacattcttaaagctgttggtgccgtataccaaatcgtcactttaaaatcttcaatcatactataccactgttctggtgaaaagcgaccaccagctatacaatttgtagcgccatttaaccatggtgcaaaaataccataagatgttcctgtaacccaacctggatctgctgtacaccaataaacatcatcttcttgtaaatctaatacatattttccagaaatatagtgcactaacattgcttgttgaacatgcaatacacctttaggttgcccagtagaacctgatgtataatgtaaaatcaaaccatcatccgactttaaccattcaatgtcaaattcatcgctagcagtttccatcaaactaatgaagtctatgtaattgtcttctacatcctcatctacgacaacaatttttttcaagttcggtaatttatctacaggtactcgaggtaacaatgccttattagtaattaacactttagcttcactgttctctaatctatccgcaactgccttttccataaatgcttcaaataacggcccaacaattgcaccaatttttaaaacacctaacaacgcaaaatatagttcaggtgtacgcgacataaatataaatactctgtcacctttgtcaacttctgcatgttcagacaaaacattcgctgctttattagataaccgttgcatatctttataagtatacgattcttttctgtactcatctttgtaatttaacgctattttatcccctaatccttgatctacatgccgatctatacattcatatgccatgttcatttttccagtttcactccaagaaaatgcttgttctacgtctttccaatcaaaagtattatatatttcttcataatctttaaggttatgtttaccttgcgctcctttataaacttcgactttcatttgaaactccccctttgttatgtgaaaacgctttctttctcaatattatacataacatttctaattattcaaaatttttacttttatcctttttctagtattaattattgtaaattttctatataatgaatttaatacaatcacgacgtcgattgaggagttgaaaatatgaatcatttaaagacgtatcaatccgaagattattacattcatgacaagcaatttgttattgaaggtcctttaacatacgaagatttgaaagcgcttactttcgatgcgcatttaaccgcatttagagatgctgaagatcagtatgaagctttgttagaaattacaacattaccagaaggtagaatttatgttgctcgccaagatcaactcattgtgggttatgtcactttccactatcctgatgaaattgagcgctggtctacaggtaaccttccatatttaatcgaattgggggcaattgaagtcagcatcaattttaggcaattacatcttgcagaaaagctaatacaacttagcctttctacaccagaattcgaggattatatcgttataactactgaatattactggcattgggatttaaaaaattcaaagttagatgtatttgactataaaaaattaatgcagcggttaatggcaactggtggacttgaaatattcgctacagatgatccagaaataacaagtcatccagctaattgtttaatggcaagaattggcaaaaatattacattagaacagcaacaagcgtttgatgatattcgttatatgaatcggtttttcttttaatttttggaatatcggagggattatatgcaacaacattcatcaaaaactgcatatgtttattcagataagttattacaatatcgatttcatgaccaacatcccttcaatcaaatgcgtttaaaattaacaacagagctacttttgaatgcaaatttattgtctccagaacaaatagtacaacctagaattgcaacagatgacgaattaatgttaattcataaatatgattacgtcgaagcaattaagcatgcttcacatggcattatcagtgaagatgaggctaagaaatatggattaaatgatgaagagaatagtcaatttaagcatatgcaccgccatagtgccacaattgttggaggcgctttaactttagcagatcttattatgtcaggcaaagtattaaatggttgtcacttaggtggtggattgcatcacgctcaacctggtcgagctagtggtttttgtatatacaatgatattgcaattaccgcacaatacttagctaaagaatacaatcaacgcgttttaatcatagataccgatgcacatcatggagatggtacacaatggagtttctatgccgataaccatgttactacttattctatccatgaaaccggaaaatttcttttcccaggctctggtcactatactgagcgcggtgaagatatcggctatggacacactgtaaatgtcccacttgaaccgtatacagaagatgcatcatttttggagtgttttaaattaacagttgagcctgtcgtaaagagttttaaacctgatattattctaagcgtaaatggtgtcgatatacattatcgtgatccactaactcatctaaattgtacgttacattcattatatgaaattccatattttgtaaaatatttagctgattcttatacgaatggaaaggtaattatgtttggtggcggaggctacaatatttggagagtcgtaccacgtgcatggagtcatgtattcttaagtttaattgatcaaccaattcaaagtggttatttaccgttagaatggattaataaatggaaacattattcatctgaattattacctaaaagatgggaagatcgtttaaatgattatacctatgtcccccgcacaaaagaaattagtgaaaaaaataaaaaattagctttacatatagcgagttggtacgaatctactcgtcaataagtaacctaatctgcaacgattttaaaagataaataaaaggcattcttccaacacccatataatttgggtcgttagatgaatgcctaattttgtgaatttattttgtagttcctcggtattcaattctgtgaggtaaaactacatttggttcttctatcttttcatcgttcatatattttgttaataagcgcatccctactgcaccgatatcatataatggttgaataacactagaaagttgtggtctaaccatctcaactaatcgtgtattattgaaactaataatttgtaattcctctggaactttaataccagcatccattgcactatgcataataccaattgcttcttcgtcgctgatacataaaatggcatctggcaaattgcctttcattttggcaaaagcttttacgccttctttataactttcagcaccagaacaattcaatgtatcacctaattgaaggccatttttatttaacacttcagttaaaccttctaaaacatcttcttgagcttttttagaatgttctccacctactaaagcaaatgatttagcgcctttttcaattaattctcccgtaatttctttcgcagcttcagtaaaatcaatattaactgatgctatatgtgcatccttaccatttgttcctgatactactacaggtacagatgattgatttatcaattctttcatttcttcagtaattgtaccaccaaggaaaataataccatcaacctgtttacttaataagttattaaaaatttctttttccttttcaggatcgttatctgaatttgaaataattgagtgatatttatacattgttgcaatatcttcaagtccacgagcaagttgtgaataatagatattagatatatctggaatgatcacacctactgttgttgtctttttactagctaaacctctagcaacagcatttggacgataattcaaacgcttaatgacttcgttaactttatttttagtttctgctttaacattttggttcccattaacaacacgcgacactgtggccatagagacacgcgcttctcttgctacatcatatatagtaactgtcataatttcctccttgtaaacgttttattcattataataacatgttttcatttcattttcatagtttaccatattttaatttacagtaacatatttttgtttggaaaaatttagcgaaaagcttgaaataaaaacaaacgctaaatgataacgaacgatatattttaattttatataaacttttttcatttttaattgtaatgttttgagaaagccttttcaaatatcaattgcatttgttgaaaaatgttcacatttcagcaacaaatgtgtgaatctattatattttacagataattcatagttataattttaattactgctatcagtcataatctttaataattgtgaaattgaacaagtgtcgaagtattataacaatcgttaagtgcagtatacctttatttctatacaaaaaataatagccactctaaaagtaatatactcttagaatggctgtaagtttaaaattgtcgattcaaagataatattctacttcaacatgacatattagttaagtagtctatagtttccttggaatattattttaactttttagcgttatataaatcagctaaaggctttaattcatcataaaatgcttggaattcatctaaatccatttgttgacccgcatcactaagtgcaacagatggatctggatgcacctcagccataactccatcagcaccaactgctaatgctgctttcgcagttggtaacatgatatctttacgacctgtactatgcgttacatctaccatgactggtaagtgtgtaccttgttttaaaattggtactgctgaaatatctaaagtgttacgtgtcgccttttcataagttcggattccacgttcacataaaataatgttttgattaccttgtgaagcaatgtattcagctgcataaacaaactcttcgattgtagcagataaaccacgttttaatagaataggctttttcgtacggccagcttcttttaataactcgaagttttgcatattacgtgcaccaatttggaatacgtctaaatactcatcagccacttcaaaatcatttggatttacgatttcgctgacaacatttaaatcatatttatctttaatctgtttaagtattttaagtccttcaacacctaggccttggaaatcatatggtgatgtacgtggtttaaatgcaccgccacgaataaatttttcacctttagcatgtaagtttttagcaacagcttcaacttgttcaaatgattcaactgaacatggcccaaatacaaatgatttattgccgtctccaataatgcccccattatcaaatgttacaatcgtatcttcaggtttcaacttacgtgatacatataaatgtttttcattttcagatttttgtaaatctgtagaggctttgaaaatttctttaaataattgcttaatagtattatcgttgaatggtcctttgttactatcgattaagtcgttaagcatttctttttcacgttgtggatcatagatacgtgtaccttgttttaatttttcttccccaattttttgtgctagttcaccacgtttagataataagtctaaaatttgatgattcagtgatacaatctcacttctgtatgattctaatttattactcatccttactcacctctactaattatttcaagtatattccactttaaagcaataaaatataatgttaaaaaatattctaacaatatcatatgtatagttcaaccctaaattgacagaaaataatcaattttctaattatatgattcgagactgacatttcgattttctcagtcattattggaaagttatattctatattgatatttattagcaaatgttaatcaattaaataagtgtcattattatagcttattttgagtcaacattactgcttttaagaaaaattttcgtttctatcttctattataaatctaaaattctcatacattcaacctaacgcttaataaaaattaacaacctttgtctttgtatattaatataaatctatagtgaacatcactcaccaacacattcagctatatttaaattagtgaacgtcattgtaccttctaagattcattgtttatttgattatcgaatatttttccatcttcagcttaaaatgtgcaatatcactattgtaatctaacgatgttacaaacaacataaatacatggaatgatcgcgttgcctttcaaaataaactgatgatatcaaaaaaggtaagcacttgaatgcctaccttttattttgaaattcaatttttaaaaatataatacatagcttactgctatgattgattattaaacgattttagtaatcttagtcattgaatgtacgtttctctattttactattagctttttcaactttagcatttggcgtttttgatgcattggatgatttagcatttgttgtttttgaattcttattactagtttgattattcttttgagttgacttacttgaactactttgtttctttgcaccttgtgatgatttcttattatgttgctttttctgacctgaagttttatttgtagatgcttttgatgcatttcgtttatttgaaggtgttgtttttttagattgtttacctgatttcttgtcaacagctgtattattagttgttttttcatcagctttacgtgtaataacaccattttcaaatttagcttctttttgtttaacagtgtctttattatctatattaactgtctctgactctgatacatcattctttttagtaactaattgaggaatttctttcaagtcatttttagcaactggtttttctgcaaataacgcttcagttaattgactctcttttgaacctggtgttaatttagcttgcttctgttttgcagcgtttgctaatctttcagcttgtgactcttctttcgatacctttaatgccactgcttttgattcttcatttgatacagctacacttttatctgtttctgcttgtgcttctcttttagcttcttgaatctcttgtgcctcttgtgatgtatcacttaaattatttgcacttacttcttcttttattgctgcttgttgtgcttttaatgctgcttgctcatttttagatttgtttaaaaatccttcaacacgttcttttgtaaaggcaaccgtttcttcaagttgcgtttttctttcttcaaatttttgcgacagttcttgttctttgacttttaaatcatctgctttttgataaactttatttttaaaatacaaacctaaagctgaaccaacaagcgcgccagttataaaactaacaacaaaatctttacggttgggtaatggttcattttgataagtgtgtttattttttaatgttcttttattattttgttgttgcgtcatttgtgtatcctcctataacaaatgcacttaaataagtaacaacctcatttaagtgcatttgtttaattattaattatttatctactcgagaagtatagctatgatttgcatcagttgctacattattagctttgtaatttgcacttccacgacggtagtgtctattttgccatttgtctgcaatttccattgcaacatttgaccattgaacaacttgtgagattttatcttcattttgagaaatattatgtgtaattgaatttgttacacgatctacagagctgtttaacgtttgtactgagtcaccgatacctttaacagcatctacaactgagtttaaacgatctactttaccttggatatcctcagttaaacggtttactttatgaagtaaatctgttgtttcacgagtaataccttgaacttgaccttctacaccgtcaagtgtttttgcaacataatctaagtttttcttaacagaatttaatacagctacgataccgatacataaaattaagaatgcaatcgcagcgataattccagcaattggtaaaatccaatccattaaaaacgcctcctaattaacatgtaataatgtcattaataataaatacccatactactctattataaacatattaaaacgcatttttcatgcctaatttatctaaatatgcattttgtaatttttgaatatcacctgcacccataaataaaacaacagcattatcaaattgttctaatacattaatagaatcttcattaattaacgatgcaccttcaattttatcaattaaatcttgtatcgttaatgcgccagtattttctctaattgatccaaaaatttcacataagaatacacgatctgctttacttaaactttctgcaaattcatttaaaaatgcttgtgttctagagaaagtgtgtggttgaaatactgcaacaacttctttatgtggatatttctttcgtgctgtttcaattgtagcactaatttctcttggatggtgtgcataatcatctacaataacttgatttgcaattgtagtttcattgaaacgacgtttaacaccaccaaacgtttctaatgcttctttaatatttgtaacatctagcttctctaaataactaatcgcaattacagctaatgcatttaaaactgtatggtcaccatattgtggagacaggaagtgatcataaaactcaccatccacatacacatcaaaagcagtacctttatccgtaatttgaatattttgagcataaatgtcatccgaatctttaaatccatagtaataaattggaacatctgcttcaattttacgtagatgttcatcatcaccccaagcaataataccttttttaacattatgtgccatttcttggaatgcatcaaaaacatcattaatatctttaaaataatcaggatgatcgaaatcaatatttgtcataattgcgtaatcaggtttataacttaaaaagtgacgtctatattcacatgcctcaaaagcgaaataatcactttcaggcaatcccatacctgtgccatcaccaattaaaaatgaagtctttttatcaccattcataacatgtgataataaacctgttgtagaagttttaccatgtgcaccagttacagctactgaagtatattgatcaataatctgtcctaaaaaatcattataacttacaacatctaatttcaattgatgtgcacgtactatttcttcatggctactcgcgaatgcattaccttgtataactaccatatcttcttttatgttattagcatcaaatggtaatatttttatccccttatttctaagagcaacttctgtaaatacgtagttctcaatatccgatccttgaacttcatgtcctaaatcatgcatgatttgtgctaatgaactcatgccagaacctttaattccgacaaaatgatagtgtgtcattatataaaactccttactcataattattctttatttaaatctgcttccgtaacataaacatcccttggttttgaaccattagcactcgaaacataaccgagttgctctaattgatcgataattcttgctgctctattatagccaatttggaaatgtctttggattaatgatgttgaaatatgtccttcattaaccataaatgcacaaacatcatcaaataattcatcttgtgattgtgtttgtgtttttttcaacaattctttttcttcaaatagatagtccggttctctttgttgtttgataaaatcaacaacatcatcaatttcgtcatcagaaacaaatgtaccttgaactctaatcggtttattcataccgctaccaagatataacatatcgccatatcctaacaagcgttctgctccaccactgtctaatatcgttctcgaatctacacttgatgataccataaatgcaattcttgttggtatgttggctttaattaaacctgtaattacattgacagatggtctttgcgtagctactaacatatgaataccacatgctcttgctttttgagcaattctagcaatagactgctcaacttcttgcggagccatcatcattaaatcagccaactcatcaattacaatgacaatttttggcattctttcatcatatggtgcttttttgttaaatgctgttatattgcgtacatggtaatgtgcaaataacttataacgtcgttccatttcttctacggcccattttaaactctgtgtagctgctttgacatctgtaattaccggtgcaactaaatgtggcaaaccattataaggagctaattcaaccatttttggatcgataagtaataatcttaattcctcagggtgatttttatatagtaaagacatcaaaatactattgatacaaactgatttccctgatccagttgcacctgcaattagtgcgtgtggcgttttagcaatatccataagtaatggttcattattaattctataccccatcgcaactgttaatttagattcagcatttttaaaacttggagattcaataatagaacgtaagttgactgtcgttggattttggttcggaacttcaataccaacacgactagttcctggaataggcgcttctatacgaatatctttcgctgccaatgccattttaatgtcatcttgtaatgccgtaattcttgaaactttaacacctttttcaactgataattcaaatcttgtaacacttggaccttcagttacatcttgtacttctgcaggtacattaaagtaaaataatgcgtcattcagttctttctttttatctgtaatccagtcctcgtccgactcaataacttgtggttcttctagtaatgaaacacttggcaatttaatatttgggcctttacgaatcatcggcttagatgtttgtacagcttgatttgttgcaacatcttgttggttcgtccgaggtctattttcattagctgtatcttcattttgatttgaaaatgaaggctgtaaatctttttgttgatcatcattatcttgttgtccactagtattgtttggatgtgttgtttcttcgctttcttcagttatgtcgcttacttctgaaactgaagacgaagttgattgatcaacttgctcatcttccaattgattatcatcttggctttcttcaaatatttccgtttgagttgaatcagcagaaggtttctgctctgaatattgttgtgcattttgataatcattttctgtttctgcatggccaataagttgattgttctcaacattgtttgatgtcatattatttgttttatatgcatttgtgtttgactcttgtgaatcaaatcttgatgatggtgcggcttgactcgcaggcttgctttcactcacagcttgtttactttgtacaggctttaattcaggcacattgacttttgaatgctttttacgatccatcatacgctttttatcagatggcgtcatgacaacattaaatggtcttttacttaaagttgaaaccttttcagtctgtttctttggatttacgttttcaatagttttctcttcgacattttgttcactttcagctgcttcgttttgcacattttctgtaatttctgcgttatgcttttctatttcattcatgcttgaatcttccacaacatgaccatcattcacatcattcgttttcaatgagttgacatttaagtttgtttggtcatcttttttatgacgcggtgctaattcaatttcattatcaaccgttttatcgatattattaacttgagattcagttactgcgtgctcttgcgttttaggagcgtctacatgcatttcagacgcgtttctattggtattatcttcgatatttgaagtagtatcctcatctgcttctgtatcatttaattcataaaattctgcatcatcgatttgacttcctgaatattcttctttattcgttgctccatcttcttctgaatcagcaattaatctggattgattttttagttcatctttatcatttacttcaacgttatgttgtagtgctgattgatgttgagacgttacattcgaaaccgtaacttcatcatctgacaattgttttgttgtcgatacttgattcaaactaacttcctcataattgtatggactttcatctacatgagtgtcattagtgtcttcattttgtattgacgcttgtttattttcatcatttgatacagtttcattctctatgccatttgtatgaagctgactagcatctgtactattatctgttaagtcactatcatcatttaatgaactatcaccaacatagcgttccgcttgtttagcatacatttcatcaattgcacgttgtattgcatcttgctcttcgtttttatgttcttcacgcttttgttgcaacgcttttttaaatcgacgcttttgaagcactttacgttctcgttcacgtctaatttcttcaacaatttgtgaagcataaatattttcaattttgatagtattatcaacttttgaataattaggcattgattttgttgttgatgatacattttcatcagatgatttagatgcagttccttgtttgacaacactatcattttgtttttcttgttctaattgtttattttgagacgtttgcgtcttagctacatatttatcatatttttgtttatctgactcaactttttctgaaggtttacttacagggatacgaccattttctaactttttaggtttcattgtgccaaaaatagctgacggtacctctgaagtcttgaaactttctttgtgataatctggagttgaatctttagcacgatgatttgtattattagaatacatattatgtgtttttgacttgtgcgtttccttctcaataccattaattgcagaaacatatgtacctggcttattcgtatggtaatgtgaatgatctttatattttatactttgctgtgatattttagaattcccacgttgttcactataattttgttcttcagttgtttgatttcttctacggcgatgtcgtttttgtgaacgagaatcgtggctttgtttgcgatagtctcgatggtattgttctttttcatctgaaatagtatctgcagattgttcaacattttcattttcataagctacgctcataggaaaacggaattttcccctcggacgactataaatatcattattttgaggcagtaatgagtcatgatcgttatctatattttgtgattcttgacgtctttttttctttctatgaatcaagtcatcatttgaatcattatcttcgccgaataatttatcaaaccagctcatattttcactaccttccttaattattcaaaaaatgcctgtccaatttcatagctgtcatttaataccataatacctttttcttcaggtgcattaggtaaattcaattctttcattgaacaaatcataccgcttgaggcaacaccacgtaattcagcatctttaattaccataccgctaggcatcactgcacctactttagcaacaacaactttctgtccagcttcaacgttaggcgcgccacatacaatttgtaatgtgtcatttccaacgtttacatttagtacacttaatttatctgcatcaggatgtttgtctttagtttcaacgtagccaactacaaatttcggtgatagatcagcatttaatttataatcaaaaccagcttctgaaatacgcttttggaatacatttacaagttcatcagttaatttaatatgacctttttcttcaattgttatatcttttgaaatttcaaaaatattataacctacaacattaccttcattagtaatttcaacaacattaccttttttattgtagtttaattcaccttcaactggttcaatttgtaaaaatgcgacatctcctacatatttaggattgtaaaataaattcattatgacaaaactccttatccaattatttctatttatctttattaaatttacgacgatttgcttctaaacgctgaatcacgtttggatctcttttttgtttattatttttacctaaaataaatatcggttcaagatgaccctgtttatatccaaaggataatgatgtaattggaactagacctttagtgaaaaattccattgttaaatgtgccatcacatcatatcctgttttattgcgtatatctgcaataattaacacatcttggtgtggcactgctacgagcatttcgccttgacattgtgcctcaatttcatttaaaaatgcagtatttagtatcctacttgcatcatacccgtcatttgagttaataaaataaaaaatattaccttttacttcatcagtcgtatatgaatttgacaattttctaacattaaacagagacatttctcttatttgttgttcagttaacttcaaatcctctaacatgctttcgtcaattagacgatatgatttccctaaatcgactgcataataaactgctgtttctgcagtatgctcatcatagataaaaggaacaccttgtttagtttttttatcaaagctagtcgctctaatgacaggcataatttgactagatgatatactctcaagggttttatctgccatttgtgcaatagcttcatcaacgtaataaacaatttcatctacaattttttcttttttatcttcatattttgcgactatagcgttaagtttaatcgtgatacctttgttattatctgttcgataaatacgcaaagtttcttcttcacgattaaatttaaaatcaacgtctaaatggcttaaacgttcctttaatttatctctcatttgaaaggtattcatatgtaacactcctaatttcgcaccttataatagtttacaataaatcaacacatagtaacagagaaaaacgagtattaccccgtttttctctagtctaaattacacgtattgagctaaaaatgcatctatctgttcaattgattttcgttcttttccaatataacttccaagcagttctccatttttatatactagaaaacttggaatacccataataccattttcaatacaaatatccataaatttatcacggtctactgatacgaagtcaaacataggatatctcgcttctaattccggtaaatctggttctatcactctacaatctggacaccagcctgcagtgaattcaaatactgtagcaccttgttttaaagattcaaattgttgttctgattcaagttgtttcatttttatgtctccttaattaatgaatatatataactatttagagataatagttgttattacccgattatttatattgtaatgtttctatttgattattatctaaattacaaatggcttctgaaagtaaagatctagctgcaaaatagtctcttatatcaaatactgagtctgtactatgaatatatcgtgcacatacaccaataactgcagtcggaataccaatattagctttatgaatttctccaccatctgttccacctggtgacatatagtattgatgttcaatgtcatgtgcttctactaactttaataaatagtctctaaatacaggctttaaaatcattgtaccgtcttttatgcgaattaacgtccctttaccaagttcaccagataatggttggcttcctttaacgtcattggcaggtgaacaatcgactacaaatgcaacgtctgggtctatcatctctgcagatgctttcgcacctcgtaatccaacctcttcttgaacatttgcgccaacatacaagtctacatctaattctatatcttttaataattctagtatttcaattgccaagacacaaccataacgattatcccatgctttagcactatatcgatgttcagataactgtgtgaatggcgtgtgaggtacaattgtatctcctatatctattccgcgctcacgcacctcatcttcattttgagcacctatatctaatgttaaatctttaatttccggtgcgccttcactaccagtacgaaaatgtttaggtatattagaaacaacaccgataattttatcgccatttctatttttaattactaagcgttgtccttgccaaatatcatttgcaacaccacctaaatttgtgaattgaatcattccatttttagtgatatttgtaatcataaatccgatttcatccatatgtgctgcaatcattacacgttttgcatttggatttttagattttttcacaccaaaaaatccacccatacgattttcaataaattcatctacgtacggcgccatttgctgagtcatataattttttacttcttcttcaaaacctggtgccccatgaagctcagttaaagtttgaattcgttgtaatgttacttttttatttatgttcataaaagttctcactccttataagttattatatcatcttcaatatggtaaactaatgatatgaatttgaaatcaagggagcataaatgatgactaaactgaaatatataattccaacaataattgcagtagccattgtaattatttctaccatttcaatcatccaatatattaatcgtaaacgctataatcccgttaaagtacttaatgaagtaaaatcatattttatgaatgtcaaaggctcatatatcgtttatgaaccattcgttcatcctgaaactgataaataccgtttagtttatcaaggtggaattacaactattaaaaatggtcaaaatattcattatgatttttatgcagatgcatatactggtgaagtcattaacattgtagagcgttaatacgaattttatccatatttgatttggatcgtaaaacttaaaaatgagccacaccctaattagtaagattggatgtggctcaattttttatttttgaaaatttgtttagtaatacatctttattttagttattatcaactaatgtttcacgtaaaatatatgcatctatgttttcaccatcatcgctgtattttacagcaaagtagttttcatcatgataaaacaagaaccaatattgttgctgaataaaatatggtatcatgcgttctttttcacgaatcgattgcataggataatcatcatatgccgttacccatagaggatttttatgtgcagtagttgggaatatatcacccatatgaactgctttatctccttgactttcaatcgtaataatcgtgtggccaaagctatgacctccactatgttgcatcttgatacccggaaccggttcaaaatgtttttcgaataaaatcaacttgttactataatcgcctttattcttatcccagtaagttgatttacttcttatattagttgcaataaactcatgccactcatcttgttgcacaacatgaatcgcattttcaaaaattgcatgtcccgcttgatcagtcaaaccggcagcatgatcaaaatgcatatgtgtcattagcacataatcaatatcctttggcgttaaattataatttgccaaatcagtaataatatgactttcttcatctactccaaaattacgtaattgcttttcagataatttaccattaccaatacccgcatctataatcaaattatattgagccgtttgaatcaaaattggatgtgtcggtaaattgatttgatttcgttcatttgcattgtattgctttgaccacaacggcttcggaacaacaccaaacattgcaccgccatccatttttgtattgccgccatttagataatgaatagatatatccccgattttcacaacatcacctattctttctgtattcgttattacaattagcatgtgtttattacatcatatcactattcataaatgcgaacaaaaacgaaacgccccacactaatacacttctaactacttataaagattaatgcaatcatattatatgtaaatgcatcataaccatcggactgtaattttaaattaataattaaaatttccaagtaaaatgcaagctttattcttttaaatcaaaggtatttagtataacattgttcataggcgcaattgtctcctttagtttaggtttggtcactttaaattacagaggcaattgcgcttttttatattcaaaatcaaaaaatcggacagatgaaaagtaaaatactttttctatcagtccgatttattatagaacccttttactatagaaccattatagtacgaaaaaacacttatgattgtatgtgtacataccctcataagtgctttatttttgtgaatggaatttcgcttccatacgataaatacgtgaccctttattcgaaaatttcttttcatattctgttagaatattactgccatcgtcttcttgatgtaaatttagatttatttttgtaaaatacattccaaattgagacatactttctaaactgtaggcaaatagtcctctgttatcagttttaaaatgtaaatctccttcatcatttaagatttgttgatacaacgctaaaaacgtatgatacgttaaacgtcgttttgcgtgacgattttttggccatggatctgaaaagttcaaataaatacgcgaaacttcgccgtctttaaaatattcatttaattcaatggcatcattacaaataatctttaaatttgttaaactcatctctttaactttatccaatactttataaacgatacttttctcacgttccattgaaatatagttaatatgaggattttgagcagctaatgttgtaataaactgccccatacccgaaccaatttcaatgtgtatcggttgcgttttatcaaaccattcagtcattttccctgcatgttgaccgtccatgtcaaccaattcaggatgatcttttaaataatcttcagcccatggtttgtatcgaactctcatattttattctcctcttaaataaacatgttactattcataacttgatttaggaatttaagccaagtgttcatatccttatatcttttttgctcttcataccattgcacaagacctatagattgaattaccgtataccatttcatacgtttatttaaattcaagctctcttgaacaccatatgtttcaagccattcagaccattgttgttgtggaacatagttgtaaagcagcattccgatatcaattgccgggtctgcgatcattgcaccttcccaatcgactaaaaatagttcatctcgatcagataataaccaattattatgattcacatcaccatgtacaacagtgaaaaaacgtgaatctaaactcggtatatgctcttctaaataggttaatgattttctcacaatatgatgtgttaaaacttctcttgataaagaggcattaattttattaagcataatctcaggagtaataggttccatttccatacgctttaacatacttaataaaggtctagaattgtgtatcttctttaataaatgtgcaactcttgtttgcttcatttcgtttgaagatagttcacggccatttttccaatgttgtgctgtaacaacctcgcctgtttctatgcgcttcgtccatactaatttgggcacaataccttctgctgataatgccgcaataaatggatttgaatttcgttttaaaaacaacttttgtccatcttgttcagccatatatgcttcgccagatgcaccacctgcagaatcaagtgtccaccctaattgataaaactgctccaactcgtccacctcactttcaattagaaaatggctctagaaataggtttttcaagagccatatattctaatttataacaccatactggtacaaatattatgtccagataattattgtaaatcctcaactaatgcctacattacacgactaaatttaaatcgtaatgtctgtcattgacaccatacattctatagtcacttacttgacataaaatgttaccgtgtctaaaactacatgtttttgtaacttttgtaggcgataaactctagttttcaaaataattgctatcccattttcatggttagcataaatttatgaactgtaacatttacgtacttagtaaaatatgatgcacatcatatttgtaactcatagaaaattttataatttttatcattatatttcaactgaaaatgagaaacaaaatggcactttttactaatatgtgttttctaaacaatacttttaagcttcgttttaaattataacataattcacttacgaaagttgataaatttaagtaatttaatctaaaaatatgatgaaagaattttaaatactgtgtgactctatatacttttcaaatccttcttgtagttgacgtgtaattgggccaactttaccatcattaactggttcaccatctaatttaataacaggtgtaacctcagctgaagtacttgaaacaataacttcatctgcgtttctcaagaaatctacagtaaacgtttcttctttaaatgggatattatagtcttcggcaatttttttaattacaattcgtgtaataccattaagaatatagttgttaatcggatgtgtataaatcacaccgtctttaattgcataagcattacttgaagatccttcagtgacagtttcgcctcgatgttggattgcttcaacggcattgtattttacagcatattcttttgctaatacatttcctaataaattcaagcttttaatgtcgcaacgtaaccatcggatatcttcaacggtaacaccattcacaccattttctaaatgatcataaggacgatcataactctttgtataagcaacaattgctggttctacttcaggtgttgggaagctatgatttctttcagctacacctcgcgttgcttgaatataaattaccccagtttcaatttgattcatatcaactaatttacgagatagttcaattaattcttctacagaataatttaaatctaaaccaatctcattggcactacgtaaaaatctttcataatgttctgttactgtaaataacttaccattatatactcgaatgtattcataaataccatcgccaaatacgtatcctctgtcgttgtatgaaacctttgcttcacttggacttacaaactcaccatttaaaaaaattttttccatatattattcctccacgcataatgaataaattgcttctaagtaaatactagttgcgttaaataactgttttttagtgatatattcatttttctgatgcattaaatcttcagaatcactaaacattgcgccaaatgctacacccttgtctaagtttctcgcataagtaccgccacctatagtataaggttcagtcatatcatttgtttgatttctatatgcagtaactaacttttgtacaaaaggatcatttttatcaacataatgtggtggttggactttacctaatttcacttcaaagccatattgttgaatctcatttgcaaaacgatccatagctttttcaaattcaaatccttctggatagcgcaagttgataccgaaaagacccgcattttcattatcatatgtaataacaccaatgttatttgtcacgtcacccatgacatctgtatggaatttcattcccatcttttcaccaaaatctgaatcaaataagtagcgattactaaatgctacaaacgcttgtgcattattatcaagatttaatgatgccaagaattttagtaagtaaagacccgcattcacaccgatagatggatccataccatgaaccgctttaccttcaactgttaaaactagaatgccactatcaacagtactatcaccttgtaaatgattttgttctaaaaagtactcaaagtcttgaataacatctgtcatattttctttaacaagcactcttgcttctgcatgatcaggcaccatgttgtaacgttcaccagatttaaaagttattaattcataatcaggttcatcttgatcttcagcaagcttattttgaactaagtcaaatgttgtaatgcctttttcaccatgaatacacggaaattctgcatctggtgcaaaacctaatgttggcatttcttctgttttaaaatagcgatccgtacatttccaatcagattcttcatccgtaccaataatcatatgaatacgtttcttccaatccacattcatatcttctaatatcttaattgcataataagcagcaattgttggacctttgtcatcaagtgtacctctagctatgatagcatcttctgttacaaccggctcgaacggattactatcccatccatcaccagcaggaacaacgtcaacatgacataagatacctaatacgtcatttcctttacctgcctcaattcttcctgcaatatgatccacatcatgtgttgtaaatccatctctatgtgcaatttcatacatgtagtctaatgccttacgaggacctggaccaactggtgcgtcttctgatgcttttgcatcatctctcacactttcaattgctaataatccttttaagtcattaatgatttgatcttcgtattgttgaactttttctttccacattcgaaatcgacttccttttttctataagttaaattctattttacatgaaatgatataaaaactacaataagatgtcagaaaataataaaaaggaacaaaacgatgctatcgatatgacacaaatcataaatagctgctttgttccttttttaatttatatatttaaaatacacatattcaagaactcgagatataagtcaatgtactaggcacacaatttaatattgacagtaattaaccgaacgaaaatgcgccccggggcccccaacatagagaatttcgaaaagaaattctacagacaatgcaagttggcgaggccccaacacagaaactggccaacagtcagctttcaataatgtgcaagttggggtaagggccccaacatagagaatttcgaaaagataaagaaatacgttttctttagatattagtattttttatgaatgagtttcacgcatgtattcttctttctatatgcatattagctatgactaacgataaagaacctgaaacactaataaatgtcctatagtttacaatattatattggcagtagttgactgaatgaaaatacgcttgtaacaagctttttttcaattctagtcaaccttgccggggtgggacgacgaaataaattttgctaaaatatgatttctgtcccactcccttatcatttctgtcctactcacatcttattctttatcagatagtgcatttttattcttttttaagtcttcttcagtgacgatacgtaaattattatttggtgcggcgccaccttcatcatcaaatttacctttttcaatactttcgtcagtcttattgtcatattcggtaaattttgatttttcttcttcgaaaaatgcttttggattattttttaatctattagcatattctttcggatttgtttttacttctttaattgtttcattagcaattgttcctaattgcgtcgctttatccttagcattatctttatagctttgaggatcttgtttatatttattatattctgctttcagcttgtcacgactatctttacgtgtaacaagtacagctgctacagcgccacctatacccaaaatcgctttaaataaattaccttttgccatatcaatcgtctcccttttatttataatttaatttgtcaaaatcattttcagttaataaacgatattctcctgaatctagattgctgtccaattctaaatcagcaattttgatacgtcttaaatgtaatacctcattttgaatgctatgaaacattcgtttaacttgatgatattttccttcataaattgttacgtgtgacgtttgattatcaatataagttaaaattgcaggcttaaccttgccatcagacagtgttacaccctctttaaaagcttgaatgtcgtcttcagtgataggatttgctgaaataacttcatattttttagaaacatgtttgtttggactcattaattcatgattaaaatcaccatcattcgttatcaataaaagcccttctgtatctttatcaagacgaccaaccgtaaaaatatttagatgttggtattcaggtattaaatcaataacggtttttgaatgatgatcttcagttgctgatatataatcttttggcttatttaacataatatagacattttcaatgtattctattaattctccacgaactgttatcttatcgttttctggttctatatgtgtttttggtgatttaattacttgttcgttgacatttacaaggccttttttaagtaactgtttgacctcattacgtgtaccgacgcccatatttgctaaaaatttatctattctcatcgtaaaaacctaactctacgtcttaatttttcaggaatttcacctaagaattcgtccgcaagacgcgttttaattgtgattgtaccgtaaattagaatacctactgtaacacctaaaataataatgattaagtaaccaagtttagtaggttctaagaatagatttgcaaggaagaatactaattctacacctagcatcataataaatgaatacaagaatatttttgcaaaatgaatccaactatagctgaatttaaacttcgcatattttttaagaatatagaaattacatccaattgcaaataataatgcgatactagtacttaaaattgcaccaggtgtatggaataacataattaatggatagtttaacgctaacttgataactacagaagctaaaataacataaactgttaatttctgtttatctataccttgtaacattgatgccgttacacttaatagtgaaattagtattgctacaggcgcataatagaataataagcgactaccatcatggttagggtcatgacctaaaacaattggatcgtaaccatagaaaactgtgaataatggttgtgccaaggccataattccaatactagctggaacagttataaacattaatacaccaatagatgttctaatttgatgatgcatttcatgtaagcgaccttctgcaaatgtttttgtaataaaaggaattaaactcactgcaaaaccagcacttaatgatgtcggaatcattacaattttattagttgacatatttagcatattaaagaatatatcttgtaactgtgaaggtataccaactaaagataaagcaccgttatgtgtaaattgatctactaagttaaataatggataattcaaacttacaataacgaacggaatactataagcaataatttctttatacatcttgccatatgacacatctatatctgtgtaatcagattcgaccatacgatcaatattatgcttacgctttctccagtaataccagagtgtgaatataccaataatcgcaccaactgctgctgcaaaagtagcaataccattggctaataaaatagagccatcaaagacatttagtactaaataacttccgattaatatgaaaatcacgcgtgcaatttgctcagttacttctgacactgctgttggccccatagatttataaccttggaatatacctctccatgtcgctaatacaggaataaagataacaaccatactaatgattcttataatccaagtaatatcatcgactgaccaaccgtttttatcatgaacgtttctagctaatgttaattcagaaatataaggtgctaggaaatacagtaccaagaaacctaaaacaccggtaatactcattacaataaaactcgatttataaaatttctgactgactttatatgccccaatagcattatatttcgcaacatatttcgaagctgctaatggtacacctgctgtcgcaactgcaattgcaatattatatggtgcataagcgtatgtgaacggcgccatattttcttgtccaccaattaaatagttgaatggaatgataaaaagtacgcccaataccttggtaattaatatactaatggtaattaaaaaggttccacgcaccatttctttactttcactcattacgaatctccctatctcatgtttattaaagttttgtaaactaaaagctatttctctgtaaaatcatttttcattattatgaatatatcacaaaactttatttcattgtcgtatattcaatgaattatcataacaaaattatcaacacattgtcattgaatactagattttgattagaatattacgaaatttcatataaacattatactactatttgagatgaacatcgcataacagtagaaaaatcattcttatcatacacatacatcttcattttttatgaagttcacattataaatatattcaacataattgtcatctcataacacaagagatatagcaaagtttaaaaaagtactataaaatagcaattgaatgtccagtaacaaatttggaggaagcgtatatgtatcaaacaattattatcggaggcggacctagcggcttaatggcggcagtagctgcaagcgaacaaagtagcagtgtgttactcattgaaaaaaagaaaggtctaggtcgtaaactcaaaatatctggtggcggtagatgtaacgtaactaatcgattaccatatgctgaaattattaagaacattcctggaaatgggaaatttttatatagtcccttttcaatttttgataatgaatccatcatagatttttttgagtctaggggtgttaaattaaaagaagaagatcacgggcgtatgtttccagtttccaacaaagcacaagacgtggttgatacattagtgacaactatcgaacgccaacatgtaacgattaaagaagaagaagctgttagtagaatcgaagttaatacagaccaaactttcactgtacatactcaaaataatagttatgaaagccattcgctagtgattgctacaggtggtacaagtgtccctcaaactggttcaactggtgatggttataagttcgcacaagatttaggtcataccattactgagttattcccgaccgaagttccaattacatcagctgaacctttcatcaaatccaatcgtctaaaaggtttaagtttaaaagatgttgaattgtcagtacttaagaaaaatggtaaaaaacgcatcagtcatcaaatggatatgttatttactcattttggtatcagtggtccagctgcattaagatgtagtcagtttgtttataaagaacaaaaaaatcaaaagacacagcacatttctatggcaatcgatgcatttcctgaattaaaccatgaacaattaaaacaacacatcacatcattattatcggacacaccagataaaatcattaaaaacagtttgcatggtctaattgaagagcgctacttactgttcatgctggaacaagcaggaatcgatgaaaataccacatcacatcacttatcaaatcaacaattgaacgacttagtaaatatgtttaaagggtttgtatttaaggtgaacgggacattacctatagataaggcatttgtcacaggtggtggtgtgtcacttaaagaaattcaacctaaaacaatgatgtctaaattagttccgggattatttttatgtggtgaagtattagatatacatggttatactggtggttataatattacaagtgcactcgtaacaggacatgtcgctggattatatgccggacattactcacatgcatcaatggaataatagtataaaatttggttcgattctctttagtagatcaactttttcattcaattaaaaatgaccttaatataactgagtcactaaaaagtgtcgttatattaaggtcatttcgttaattatgattctttttcgtttttagtacgtcttctagctaacaaagccgcacctgtaatcagtgcaaattctttcaatggtaaatccatttcttcagaacctgtatttggaagttctttttcaactttgcgcgattcatgtgtctcttcttttttaataggcgtacaaacttttggagctggctgaattacttttggtgatactttcatcgcttcagctggtaatttaattgctaaaatttcatcaacaatgaattgcgtatgttgtttgatgtcatttaatgtcgcatcttcatcaatcattctattgccatctgcaacatattgatcaattaatacttttactttagctaattgttctggtgttgcgatcgctttgaatttcgcatatgtttgttgagcaatgttatcaatgcgcagtaagctattttctttttcagtaattactgcttctatatcgcttaatgcaacattaaatcgttttaaaactgcatcaacatcagcattagtgcgtgctgtttttaattcttcatccatttgtaattttaaagcagttatagcttttaatgcatcagccttattacgatcacttacttttcgataattttgcactaaagcagtgacgcgtgcaagatcatcattaatcgttttttcagcatctggctttttaataggatgtacatctaaatcatgtattgtttgtagatttaatgatgctgttttatcaacttgtgcattgctacgatcttgatcaatttgtccaatagcagtgtcataaatattttgtaactgtgctaatatactatttctttcttctaccgttgcttgaatattcgcttcaattgcttgttttttatcgttgaataatgttgtcaattgttctcgagcagacgcctttctgctaataacaggttcgatttcacgaatttcgtttttctcatcatgcaataaatatgccacatcagcattagtcactgcactagcaatttgttgtttagctttaattaactctttttcaacttgtgctattgcaatattttgttcttcatctgtcgcttcgttatttgctttaattaaattaattttatttgtagcgatattttgaatttgttgtaatgctgttgctttaactgttgtcgctggtttaatttttgaaataatattttgagcatctatactatcttgattaacttgggcagtcttatctgcatgattgatctgatcaatagcctgattaagtgcttgttctactaaatgtttagcagctagtctttcttcttcagttgataaatcgctttgatcgattagtgcattttgagcttcggcttttacaccaacagattgacgcgctgctggtttaacttgaactttaggtaaaatcactttgatgttgtcgttgccatcagtctcagttcgatccacttctgcattcgttttgttttgtgcaatgtcatttttaattgtatttacaattttatttaaagtatcaatagcaacatctctttcatcttgagtagtatccaacgtatttcggattgcatcgagttgatttttattattttcttcaatgctatcaagcgcagctcgtttacgtcttactttaggttttatttgctcaattgccttgattgtttgatttctaacatcagtaacagcagcatcttgatttgtattttctatttcttgttgcgcttgtttgagtgtgtcgctaattaattgattcgcttcatctaattcatcaactgttgcatgtggtgtatcttttattgattctacttgattttctgcacttgcttttattgcttgttgtgcttcaggcttaattacaatatgaggttgtacaccttttagtgtagcaatgccatttgtttcaacacgtttcacatcattattcgttactgcttgattgatgttttgtaatgcaagttttttattattcgctaattgatttaaagcaacttgtttttcttcatcagtcgcatgttcagcttgctctatttcttgctttttagcctcatattgttgctttactgcatctctagcagctgctctaacaatatgttcaggcgctactaaagcaatgctatcaagcgcttgacttgttgtatcatcaacttgttgatttgttctattattcgtaatatctgtcatggcttgatttacaaattcattgattttatctagtgctacttgtctttcttctgctgttgcttctttatcctgattaatcttagcacgtaattcattcgctttttgattgattttttcacgtgcagctggtttaacttttgtttcaggttgaataattttaatcgctgatacaccatttgttgctgcttgattcacctgactattcgtttgagcttggtcaatagctgcaagtgctttttctttttctttagctaatgcttgtgaagcaacttctttctcattatctgttgaatcaagactattatcaatttgctgttgcttttctttaacagctttttcaatatctgcaattgcctttggtttaattactacttcagcttcaacattatctatagcatttaacgcttgatttgtagttgtgtctacctgatcatttgtttggttttgattaatttgattaaatgcttgatctttaagttgattgatttgattaacagcagcctgcttttcttcgtcagttgcattaggtgtttgtttaaccgcttcaatacgcttcgccacttcagcagtgattttatctcgcgctgcttgtttttttactacgtcaacttgaacagcatcgatattattctctgctactgtcgcagcttggtctacttctgcatttgtgttagcttgtttaatactttcaatagcttgttgtctgtcttgatttaaagtattgatcgcagcatttttctcatcattcgttgcatctggtgtagcattgatttcagctaatttagcattataatgctgattgatttgtgctaatgctgcaggttttttaacaatatttggctgaatcgcattaattgcttttgtacctaattgttgcgcttgatctacttccgcatttgtatcagcttgatttatattattaattgccgttgctaactcttgatccacttgatttaaagccacttgcttttcttcagttgttgcatttgtgttttgattaatttcttgctttttagcagttgctaaatcatttaatacacctgtagcagtttgtttcttcgttacatgcggttgaactgcgccgatttgattgactgcatcgtctctaatactattgaccatcgcagtagtagatgtcacaccaatatcagttaatgctctatttttaagtgtattgacacgatttatcgcttcttgtttctcttctcgagtcgcgccaggtgtagcattgatatttgttatcgcctctcgcgctttatcatttacaacattgcgagcatccgttttaacttgtgttgccggttgaatcactactatattttgtgtgccctgatcttttgcttgtgcaacttcttgattcgtatctgctgcattaatattttgcttcgctgtggctacagcttgatcaagtaattgttgtgctgcttgttgttcttcgagcgtcgcatcattattattaaatatcgtattatgttgcgtttccgcacttttatcgatggcattttttgcatctgtttttacctttgtagctggtgtaattgcttgtattccttgtatcgcatttgtcttcacttgttccacttcagcattggtattagcgtttaaaatgtttgtgtttgctgcagttacagcagcattcactttgtcaattgctgcttgtctttcttcttgagtcgcatcaggattagcattgatctctgcgatatgttgttgtgcatcatgtgatacggcatcccttgcagcttgcttaacaacagttacaggagcaattggattaatggcatttagaccatctcctttggcgttatcaacatcagcatttgttgttgcttgattgatttgttctaaagcatggttggttgcttgagttaattcgttcaatgctgcatttttctcttcctgagttgcttctctattactatttatttgttgtcttttcgttgctgttgcttggttaattgcatctcttgcagcttgtttatgtgtcacttgaggaacaactgatccaatagtattgatgccattatttttagctgtttcaacgtcagcatttgtagtagcattcgtaacattatcaatagcatctgtttcatccgtagctaattgatttattgcatcttgaatctcgtcttcagtagcatctggtgttgcattgataatttccctttgtttcgttgctttatcacgtattgcttttttagcatttggtttaacaaccggtgttgcagtatccccacttaaggtctgtataccttgatctttgattctagtaacgccatcatcagtcgtttgatcaccaatatcaccaataatattgcctttatgttcctcgataacttgtattgctgcttgtttttcttcatctgtcagttcatcattttgattaactaaatcttccatttgatcagctttttgatttactgcattttcagcatcaacacttcgaattaaagtatgttgcatctgattagttaatgtatcaatatctgcttgagatactcttttatttaatggtacattgttacgattttcagctaaaattgtttgtgcacgttttttaagatcattaaagatatctaatgatgcaaatgtataatcagcttgttgaatacgtctgtcaacttcggcttgtaatgcatctttattcatgatgatatcgatagtatatggatttgtacttacagtatgactttctgcagctgaattaatgaaatcttgtgtatatgttttatacgttaatgtatcattaaatgttactgttcttggtgtcggtacattattaacacgcaacttatactttaaatccaatattttatcaggcattagtcgtgcaggtgaattcgttgtgccaccaccagtgcttttaattgttatcactcgattcgccgcatcatatgtaacattcatatcattaacatcaacgcctgaattgttacttggaaaatctttagtcaatgaattgttcacatattctaccccttcaggtaattgaattttataaacaaattcatctgtgtctaaagaagcaccagaattaccattattttttagtgatgttgtaactgtaaattctttattattcgttgctgtgggttccattgttcgtctttcaacataaacatgtgacccagaatgaagtccgatagagtcaacaaagctatagtatttgtaaccatcttttagttgataaatgccacgcgcatctgttattgcgtcatttttaggtacaaattgaattttgagatttctcacattatcaggtactttaaataaacgcaaagttggaccgccttcaacagtcttttcagcaatcgtatcattagtatcagcatttttgataataacatttgttgcgccttgaccatttttagttggcattgtattaaattcaaagattaattcagaatttggatttactgttaaagatttttcaataccattaaaatctccatgattactagcgtccgtcccgcttatacgtcctaatgcaagtacattgccttgtgcctgataggttctgttgctcccagcctcaaacatacttgttctaaccatcgcatgacttagcacacctactttaccaccattgataagtgtaaagcctggtaaattatcaacaactgttactgatggtacagaacggttggtacttggtctaatactattgtcatcaaatgacagcacttcgttaggtgcattttgtcctgcattattggcattaggatcagttgtaggcgtgtatggcgctgtaattgcaactggtgcaccaccgtttcctgccgctgcagcccatggatctgctggagttgcattaggatctgccggtgccgcacgtctacttctctttttcggtctattagatgctggttcagcaattgcaactagctctggtttatctgaagaatgacgaacatcttcttgaatttcctttaaagttagatgtcctcctgaaccattttcatttgttttatttggtacatttaatgtggtattattcgacgctacatcattattattagcgtttgacactgtctcagttgctgttgtattgccatctgtatgattattgttttgtgctgaaggcgtacttgattgcactgatgttggcgtagcttgatttactatactaccattattatgattaaccaatgcttgattcgttgcttgattggttgttgcagattgattaggtgtattctgcgcactatttgctaaacctctattattagcaacatctttatcttgtgaatttacaggtgttgcttgattagtatcgctttgtacattattatccgtagttaaggcttgtgcaccatttgggtttgaaagtaataaaactgttccgattaaagtagagaatatgcctactttatacttcctaatactatatttatttttctttaacaaattcatttcattttcctcctggttgtctgttctctgctgtgttgttaagaattatgctaaaaatatacgctccctcacattatgtttatagctatattattttgtacaatattttaagttcactcaattttatcatcatcattttataaaataaagttttattttattacaatttagtttccgttttgtaattaaaatcttaataaaacataacaagaacgctttagattgttttgtaacagaaagtaattcataccaaaaaacaccaagcaaccgaaacgttacttggtgtcattacaaatgtaatattattttaaattatgtcactactttaaatactttttatttccaaaccttcatcgccccatgcgtgcatgccgccttcgacatttacggcatcaatgccatttgcctctaaatattctacaactttagcgcttcgaactccaccagcacatacaatataatatatttcatttttattaaatgaatttaaattatccggaatggtatccattggaatcaactttgcattaggaatatatcccattgctgtttcttcgtcagtacgaacatcaacaatttgaactggtttagattctaaaagtttgttttttaattcatctgtagtaattgacttcatttcaaagtcctccttaaaacattatttagctacaatattgactaatttttgaggaacagcgatgactttcatgatgtctttaccttcaatactcgctttaacattgtcattagataaggcaatttcttgcatttcttcttttgatgtatctttagcaattttaattttagctctcaatttaccatttacttgaacaacgatttctacttcatcatctacaagtagtgcttcgtcataagttggccaaggttggtacgtaatagactcttcatgtcctaattttgaccataattcttcaccgatatgtggtgcaataggtgctaacattttaacgaagccttcaatgtaaggtttataaacttcatcaactttataacactcattaataaataccattaattgactaatagcagtattaaatcctaatgtttcaaagtcttctgttacctttttaacagtttggttataaactttatctaaagatttattatttgtagttacaatttttgaactcaatgttccatcttcatttaccattaaacgccatacgcgatctaagaatcgacgagacccatctaatcctttttcactccatgcaattgcagcatctaaaggtcccataaacatttcgtaaagacgtaaagtatctgcaccatgagactgtactatatcatcaggattgattacatttcctttagatttactcatcttctcattaccttctcctaaaatcataccttggttaaataatttttggaaaggttctttagtaggtacgatacccaaatcataaaggactttatgccaaaatcttgcatataataagtgaagaaccgcatgttctactccaccgatatataaatcaacaggtaaccaatgttttaatttttcaggatctgctaacatattttcatttttaggatcgatgtaacgtaaataataccaacaactacctgcccattgtggcattgtatttgtttcacgacgtcctttcatacctgttttttcatctacaacatttacaaatgaatcaatattagctagtggagactcaccagtccctgatggcttgatttcatctgtttcaggtaacaacaatggtagctcttcttcaggaacagttgtcattgttccatcttcccaatgaatgacaggaattggttcgccccaataacgctgacgactgaataaccaatctcttaatttgtaattaactttcttttcgccagcacctttttgctctaataattgaatagctttagtaattgccgcttcattttctaaaccatcaagttcaccagaattaatatgtttaccttcaccagtgtatgctgcttcttcaacatttccaccttcgatgacttcaatgattggcaaatcaaactttttagcaaattcataatctctgtcatcatgcgctggtactgccataattgctccagtaccatatgttgataatacataatcagcaatccaaatttgtactttttcaccagataaaggattaattgcatatgcaccagtaaacacacctgatttatcttttgctaaatctgtacgttctaaatctgactttttagaagcttctgtttgataagcttttactttttctttatattcatcagttgtaattgaattaactaatgcatgttcaggacttaagactaagaatgatgcaccatagattgtatctggtctagtcgtaaatacttctacttttccttccgcttccgtattatctacatcaaatgaaactttggccccttcagaacgtccaatccaattgcgctgcatatcttttaaagattcaggccaatctaaatcatctaaatctgctaataattgatctgcatattctgtgattttaagtacccattgtttcatcggcttacgataaactggatgtccaccacgttcagagacaccatcaatcacttcttcgttagataaaacagtgcctaatgctggacaccagttaactgcaacttcatcaacgtatgctaaacctttgttatataactgtatgaaaatccactgtgtccatttatagtattctggatctgttgtattaacttcacgatcccaatcataactgaaccctaattctttaatttgtcgtttaaaagtttggatatttttctttgtaaattcacgtgggtcgttgccagtgtctaaagcatattgctctgctggtaatccgaatgcatcccaccccatcggatgtaatacattatatccttgcattcttttatatcttgaaatgatatctgttgctgtatagccctcaggatgtccaacatgtaaaccagcacctgatggatatggaaacatgtctaaagcataaaatttcttttgacctaagttatcatttgttttaaatgttttattttcgtcccaatagtcttgccatttcttttcaatttgattgtggttgtaattcaacacatttcctcctattcaataaaaaagacacctctaactattctatttacatagggacgacatttgccgcgttaccaccctatttcacaaaaattgtgcactcattttaatagtaagagatgtcattcattcaatttaaaattaatacgatttacatttagtccttaacactagctctcagcatcactagctttctgtagaaaagctccaaacgaaattaaattatacaaattaatattatgttataacgacatttatttcaagtctataacgttaattctatttactcattatgcatctatttttttaggttgcgtattattctccttgaaaaccattaataatattaatgcaaatacaagtagtagcatcataccgataaacatcatgcgcatattaaacgcatcaactaatacaccaccaagaaatggaccaaatgcttttcctactgtagcagctgaattcacaaaaccttggtactgtccttgcttaccatctggcgctaactgattggctatagttggaactgctggccatacaaacatttctccaaaagttaaaataatcataccgacaacaaatattgtaaagttttcggcaaaactcgtgacaaagaacgacaacataaaaatgatgatgccgacaaacatttgcttctttaagtttccttttaacagatagagaatcggtttaattaatggttgtgctactaaaatcattattccgttaattgtccataaaacactatattgtgccattgaaatattaatagattgtgtaaatgaagcgattgtagactcccattgaatatatgcaacccaacaaattgcaaacattgcacaaattagtactaatgaaataaatcttgctttattctttttaccagtaatatctaattgagttggatatttaactttcgcattaatttcaatattaaattgcgttaccgcgacaagcgcaaacacaacatacataataagattggctaaaaagatatagttaaagctaaattctgcgacaaagccgcccattgcagcaccgacagccacaccaatattttgcgctaagtatatcgcattaaacgtttgtcttccgccatttggccacactgctccagccatagcgtatatcgcaggaataatcattccgccaccaaaccctaacattacaagccatacagcataccaaggccacccgtgaaagaaattaagtagcgttgtactacaaagacaagtgaaagttccaattaaaatcgtcttgtatccacctaatttatcaaatagtgaaccacctaataagtttccaataaccatgccaaatgaatttatcattagcactaaaccagcaacagttaaactttttccaagttcttgtttcatataaattgtatttaaaggccacaaaaaactggaaccagtaatatttaacgccatgccaattactagccaccagactgatttaggtatattcatatttcatagttcctctctcttttttgtcaaactataataaacactataacattaaaatatgttaaaatctgtacttagaactctttttttatagaaaggaaaatgacatatgggcaatcatttccaatacgcttttgaaaacaaacgttatcacacatggaattaccatttaaaaaataaatttggacaaaaaatatttaaagttgcattggatggcgggtttgactgtcctaaccgcgatggcactgtagcacatggtggatgtacattttgttctgctgcaggtagcggagactttgcaggtaatcgtgcagattcaatcgcagtacaatttaaagaaattaaagaaaagatgcatgagaaatggcacgaaggaaaatatattgcttattttcaggcatttacaaatacacatgcgccagttgaagtattaaaagaaaaattcgaacctgtacttaaagaaccgggtgttgtaggattatctattggtacgcgtcctgactgtctaccagacgatgttgtcgaatatttagcagatttgaatcaacgaacatacttatgggttgaattaggactacaaacaatccatcaatcaacatctgatttaatcaatcgtgcccatgatatgaaaacttattatgatggtgtggcaaaattacgtaagcataatatcaatgtatgtacacacatcattaatggcttacctggcgaagactatgacatgatgatggctactgccaaagaagttgcacaaatggatgtacaaggtattaaaattcatttacttcatttgttaaaaggtacaccgatggtaaaacaatacgataaaggtttattaacttttatgactcaagaagagtacacaaacctagttgtggaccaattagaagtgattccccctgaaatgatcgttcaccgaattaccggtgatggtccaatagatatcatggtcggtccaatgtggagtgttaataaatgggaagtattaaatggcatcgatgctgaattagcacgtagaaattcatatcaaggcttgcgttacaagtctaaggtgaagcaatgaaattagaacgtatactccctttttcaaaaacacttattaaacaacatataacaccagaaagtattgttgtagacgcaacttgcggtaacggcaatgacactttatttttagccgaacaagtaccagaaggacatgtttatggtttcgacattcaagatttagctttggaaaatacacgtgataaagttaaggatttcaatcatgtttctttaataaaagatggacatgaaaatattgaacatcatataaatgatgcacataaaggtcatattgatgcagccatctttaacctaggttatttgcctaaaggtgataaatctatcgtgacaaagcctgacacgacaatccaagctattaattcattgctatcattaatgtcaattgaaggtattattgtacttgttatatatcatggtcatagcgaaggacaaattgagaagcatgcattgcttgattacttgagtactttagatcaaaagcatgcgcaagttttgcaatatcaatttttaaaccaacgtaatcatgctccattcatttgtgccatagaaaaaatttcttaagcatttgctgcgctatactatttataatttaggattgagtagtcaacatttgaaaaattaataccaacaacaaaaagaggttttcaacttaatgaaaacctctttttatgctattaaacttacacagcaataattgcgtttaaactattttgcattgctgttgctctacttgcaatcgcatcactgatgaaattcaacaactctactttctcttgttgtaacttttcattaaaatgaataataactgttctttcatcgtcaacaggacgctctttgtaaatccattctaattcaactaaattattatacgttctcgtacgcttatacggtttaacttcaacaaatctgtccatttctttaagcgtcatagaacctttttgccataaagttagtaaaattaaaatttcttctctagacattttgtattcgctttcaatctcgctgaaaattgagttaatgtcacccaaaagtgtttctaattgcaaaatcccaaatacagtgtcgttatttacttttttcatgctaaacatctcccaattaataatcacatatttagctaccatacaagtattaacaaacatcccaacaatcccgaaacttgtatgtgctaacttatgcataaaactacaagtgtaaataaacttgctttctattcaattgtcaaagttgaataaaattaaataagtataaaaaccaataatcaatagagttaatatttagaaataagataatagtacataaaacaaatcactctattacatattaattttataatttatatacaaagaaaatatatcaatattaccattaaattgcaacaattctacatatatttcttcaaaaaagatacgcattgaatttttattacatataactctcatgaaaattgattaaactaaattaattagttagccttaaatttaacaaattaaatcaaaccgaatgaggctaaattggttatttttcaagatatgatttgtataaatcaaaacatttcttacaaatcaaatgtgtataaaatgtgatatacattctcaaccttaaaaaagttctaaaaaaaagatgagcatctactgtctcatctttttagaatattaaatttctacaatttcgtcatcttcaacaataaagcccattgtattgacgctgttatttaagaaagtcagaatataacgcattacttcatcgcgttctggctcattgtgaacctcgtggtaaaaaccttgccaagctttaaaatataattcaggtgtttgatatttttctttaaactcatcaattgccctagtatcaacaattaaatccttcgttccatacattaatagcgttggcattggttgaatgtcatgaatatgagccatcgtatctttcatcgtctcattaattgtattataccaatgatacgttgctttttttaacattaaaccatcgttaactgtttcttcaacaatttctaaattacgtgttaaatcttttggttctacaccaacattaaaacgtgtgtcttttgaaattttacctatatttgaaacaagtttatctttacgattttttccattcttttgaagttctagcataggagaaattaacatcatcccctcgattggcaattctactttttcaagtaaatttaataaaatcaaaccgccaagtcctacccctaatacataagtaggaattttatattcattagctatctttaaccagtctagcaaactttcgtgatacgtttgaaagttttcaatttgtcctttattagctcttgaagtttgaccttgaccaggcaaatctcccataatcacatgatagccatttcttcttaacatcgtaataacatatgcatatcttcccgtatgttctaatatattatgagcaataacaacgacgcctttcgcatcattttcagcttcccacttccacattattatactgcccctttttcattaatcttcaataacataattatagcaaattcactatgtagatttctatttatagtattattgttgtccatattattatatataaatgaaatcaacatcaatgatagtgtaattatacataattatttttgattgtttttgatgaaaacgctttctcgaatatttttttcatgctaaacttattgtaaacacaagggtttggaggagtagcaatggcactattaaagaatttttttatcggattatctaataatagttttttaaacaacgcagcaaaaaaagtgggcccacgtttgggcgccaataaagtcgttgccggaaatacaattccagagttaattaatacaatcgaatacttaaatgacaagaatatcgctgttacagtagacaatttaggggaatttgtcggtacagttgaagaaagtaatcatgctaaagaacaaattttaacaattatggacgcgcttcatcaacatggcgtaaaggcacatatgtctgttaaattgagtcagttaggtgcagaattcgacttagaattagcttaccaaaatttaagagagattttacttaaagcaaatacttacaacaatatgcatataaatattgatactgaaaaatatgctagcctgcaacaaattgttcaagttttagatcgattaaaaggcgaatttagaaatgttggtactgtaattcaagcatatttatacgatagccatgaattagttgataagtaccaagatttacgattacgtttggttaaaggtgcatataaagaaaacgaatcaattgcatttcaatctaaggaagacgtagatgcaaattacatcaaaataattgaacaacgtttgttaaacgcacgcaatttcacttcaattgcaacacatgaccatcgcatcattaatcatgtaaaacaatttatgaaagaaaatcacattgaaaaagatcgtatggaattccaaatgctctatggttttagatcagagttagcagaagaaatcgcaaatgaaggctataatttcactatttatgtaccttatggcgatgattggtttgcgtattttatgagaagattagcagaacgcccacaaaacctatctcttgctgtaaaagaatttgtgaaacctgctggcttaaaacgtgttggcataattgcagctttaggagctacagttatgttaggtttaagtacaattaaaaaattatgccgtaaatagagcaagacataaacaataatttaggagtctggaacaataatcaatgttctaggctcctaaatgttatattggcagttctgaaacatttataaatctttgattatgaactcacaacagtgctctatgcttttatagattttaataaattagccatttcaattgcacttactgctgcttcggcacctttattaccagctttcgtacctgctctttccacagcttgttcaatactttcagtcgttaaaataccaaatatgactggtacattagtttgatcatttactttagaaacacctttcgcgacttcattacaaacataatcataatgagacgtagcaccgcgaattacgcatcctaatgtaattattgcatcataatttcctgatgaggctaattttttagctactaaaggaatttcaaacgcacctggcacaaatgctacatcaatattgtcttcattaacatcatgtcgaatcaaagtatcttttgcaccttcaagtaatcttccagtgataaaatcattaaatcgactaactacgattgcaactttcaaatcttttccaattaatttaccttcaaaattcatgttaaaatcctcctatattaaatgacccatttttatttttttcgtttccatataatcatgattatgtaccgtttctggtacgataacttcaattctttctgcaatatcaatgccatattgttttaatccctcaaatttacttggattattacttaataaattgatatgttcgatgttaaaatattttaaaatctgtgcagcaatatgataatctcgcaaatcttcatcaaaacctaatgctaaatttgcagttactgtatcatatccttgctcaattaattcatatgcgcgtaatttgtttaacaatcctatgccacgaccttcttgaggtagataaataatcatgccaccatgttcattgatatacttcatagacgattcaagttgagcaccacaatcacaacgttgactatggaaaatatcgcctgtaaggcacgcagaatgtaagcgtacattttcatgttgtcgaattgcaccttttgtcagtacaactatctcttcatctgtgtaagtcgctttaaaaccatacatatcaaatgttccgaaatctgtaggcattttcacttttgccttaaattcaatttctggttctaattttttacgatattcaattaaatcatcaatcgtaatcatctttaattgatgtttttctttaaacttttgtaaatcttgtcctttcgccatcgtgccgtcatcattcataatctcacaaatgacaccagcgggcttggcaccagtaagtttagctaaatcaacagccgcttctgtgtgtccatttctagctaatacgcctttatcttgtgctactaatggaaataaatgaccaggacgattaaaatctttagcttcactactaggatcaatgagctttttggcagtcaatgtacgttcataagcactaattcctgttgttgtatctacatgatcaatacttactgtaaattgcgtaccaaagatgtcggagttatcatcaaccatttgtaccaaatccaaacgttgtgcaatatctttagacactggtgcgcatattaatccccttgcttctttcgccataaaattaatggtattatcgttcatccattcagtgaccgctactaaatcaccttcattttcacgattctcatcatctactacaataattgtttctccattttttaaagccattaaagcactgtcaatattatcgaattgcatgctacccctcctaaaaaccaaatgctcttaatttatctacagataattggtctttatctttatttaaaatattttcaacatatttaaacaaaacgtctgtttctaaatgtactttatctcctaattttttggatgataaaatcgttgaacgcctcgtttctggaataagatgaatgtcaaaactgttatcatgcttatcaaataccgttagacttacaccatccacagtaatagacccttgcttaactaactgattattaatatgttggctacattgaatcgtaataattttggcattggctgtttcatttatttttgaaactgttcctagttcatctacatgaccgaggacaaaatgtccaccaaacctaccgttaccactcatggcacgctctaaatttacttctgattgtcgcttaacatctgctaaataggttttattttcagtgcctttaattacttgaacagtaaaagatgtctgatcaaaatcaatcactgttaaacatgcaccattaacactgatggaatcaccaatatgcatatctgccgtaatcttatgtgcttcgatttcaatcgtcctgactgattgacgaatttgaacacttttaacgacacctatttcttcaacgatgccagtaaacatgcatcatcacttctttcgtaaagttaatttaacattttgatttaataactcggaatgaacaatttcaaattggttcgcatctggtatctcaatcacatcatttgtttgataaaattgataatttccagatccgccaattaatttcggggcataatagagaataaattcatctatataattagattggagaaattctgaagtagtggttggacctgcctcgactagcaaagttccaactcctcttttatataaattgtgaagaattgttgttaaatcgcaagacttcaagtaaataatttcaatatgtgtttgattggttgttaaatttggattttcagtatatatccaaattggtgttgattcatcttgataaatttgctgattaaaatgaatattcccagacttagacaatattacttttatagggttttttccatcttgaatacgtgtagtatattgtggatcatctaattcaactgtacgtcttccagttaacactgcgtcgtgtcgatgtcttaacttatagacatcttgtttaacctctttgttagtaatccattgactttgtccattatcattcgcttgtttaccatctaaacttgcagatactttcactgtaatttgtggcagttgctttgcttttgctttaaaaaagtcttggtataattgtgatgcccgttcatcatcaacgcattcaacctcaataccgtgagcccgtaacgtctcatcaccatgtgtgtctaacgaattgtcttttgttgcgtaaactactttagttatcttacaatcaataattttgttaacacagggtggtgttgaaccaaaatgactacatggctctaacgtaatataaatcgtcgcaccttcagcattttgttgtgccatatcaagtgcttgaacctccgcatgcttgtcaccttttctcaagtgtgcaccaataccaacaatcctaccttctttaactacaacagcgccaacgggtggattaacacctgtttgaccttgtaccatatttgcaagttgaatcgcataatccataaattgactcaaatgatcacctctataaacaaaaatcctcacatcatgaattaagatgcaaggagaaaaatttatcgttaaataagcctatttgtacacatttttacaaatacgctacattatctttgtcgataattaacattctttctcccatccagactttaactgtcggctctagaatctcactagatcagccactaatatgaaacatattagcaggtcgcaggctttatttactgccggttgggaatttcaccctgccccgaaagaattatatatgaaattgttatagattatttgagtacgtagtatgtcaactacatttaaaatgatactatatgttttctgaaaaaacaattaatgacggttttaatttaatataatctgagtactataggcatctcattgatatgattcttactaacagacattaaaatcaaaccttcaattcgtctctatagagcgttctctttattatcttctagttacaaattattgattgtcactgcgctgttgttgctcattcgattctaaagcatcatataattgagatactttatgcgcaacttgttctacaatcattttcacaccatttcgtagtttattaacaccgtttgtcatttgacctatcgcaatcatatttgttaatgttccaaaccttggactaataacttgattggtttccggaatgatttgtatgcctcccattgggtgtgcttgtacaatttgtctattttcaagatttttaattaattgatcatcttgatccaattcatttaaatgactttttgcacctgtcgcgttaatgacaacattatatatgtctactgattcttggtttttgtatgaaaaataatacaacttgccatcatgtttcacatcttctaaatcttttttcaaaattaaagacttattttctattaattcaataattagttcagcagttcttggaggcattggatttgaatttaattgaatcatctttgagtatttttgattaaattgatgttggtcttcaatacttaagctattccatatccaatttaaattctctttcaaatgttcaatcatactttggaaaatgcccatttctgttggacgcgctaaatcatacttcaaatctgcaatatgatttcctgtacgtctatatactaattttttaaaatcaatgtcatattcagcacattcttttaaaaataaagaaactaaagtatcaagcggtgcattgccgaaatgatgttttttaatgtcatttaatttgtctttagttaagtacttgaatgtcacgtctatcattgtacctcttacacttggtaaatgagcagaacgactcgtcatagtaattggtaatttcggatgatgagcagcaacataacggacaacatctaaactggcaaggcctgtaccaataatcgcaatatcgtccagttcatttacttcgtctaacgtattatatgttggataaggcgtagcgatatatccttttttaccctttaagttatatggatcatggtaggcaaatgtaccacatgttaaaaatacataatcgtacgcttgccatgattgttctgaatttgtagtacatatgtaataagttaaattcgtttcatcgatattagaatttgtataaatctcttgaactttattataattagttgatatatttggatattttttcgtgaacatagataaataagatttcatataatgtccgaatacaaatctcggtaaatatgcaggttcatcaaaattaaaatcagtttgttgtttataccacttccaaaattcagtctcatcatctaaatttaaactcatctttttcgaaggcatattaattagcagctcagaactatcattttgaaatggtacgccctgtcccatatttactttatcatcgtataaatctatatctaattgattaaacttcgggtgcttaactaactctctcaatacacttacaccagcagttcccatgcctattattgctacacgcatatatcatccatccttttgtaattcaaaatattatatttaaactattacctataattatagcaatttggtatttttaataaaatttattaaggcaagctattatttcactttcacaaccattaaaccatttaaaacttttcatttaatatcaaccttagtgtttgtgttaaaatatttttaacgaggtgaattaaattgaaatttatagcaaagatattaatctcattagtaattctatttatgatttttagtcgtaaaaacaaagcttcttaatcaatacccttgattacaaaataaattcaactaaggtgattggccatacactcaagatatggctaatcacctttttcaatgcaaaacaaagagtatattttgcaaaatcaatatctataatttatctttaatacccttttaatactaaaaccaaatttaaattacatagtcatatcgtgtaatataccaaaggaacatagacattcatctatatagatgataatctatttaacgtctaggaggtatgttatgacgtataaagaactagcaacatttttaaaagttttatcagattcaagcagattagaaatactagatttactttcttgtggagagttatgcgcttgtgatttgttagcacattttcaattctctcaacctacacttagctatcatatgaaagcattagtaaaaaccaacttagttacgacacgaaaaatcggaaataaacatttataccagcttaatcataatatttttgagtccgtaattaataacttgtcaaaggttcatacctctaaccaacgatgtatttgtcataaccttaagactggtgaatgctaatgatgacaactttagcgacactcatttttctagtaactttattatttgtattatggcaacctaaaggcctagatattggcattaccgcattaactggtgcctttattgctgttattactggtgttgtaagtttttccgatgttttcgaagtaacaggtattgtttggaatgctactttgacttttgtctcagtcattcttatttcattaatattagataaagttggattattcgaatggtcagctattcacatgcttcatgcttcaaaaggcaatggtttaaaaatgttcgcttatatcatattattgggtgccattgttgctgcatttttcgcaaatgatggcgcagcgttaatcttaacgcctattgtattagcgatggttaaaaatataggttttagtaagcgggccatattcccttttattattgcgagtggttttatagctgacacaacttctttacctttgatcgtgagcaatctagtgaatattatatctgctgattattttcatataggattcattcgatattttagtagaatgattatacctaatttattctcacttttagcaagtattatagtattgtggttatattttagaaaggcgatacctaaaacgtttgatgataataatataaagcatcctaaagatgccattaatgatttaaagctatttaaaatttcatggattgtgctagttatattacttttcggctatcttatcagtgaatttactaaaattccggtatcaattttcactggaatcattgcttttatttttctaatgttggctcgtaaatcaaatgctttaaatattaagcaagtcattaagggcgcaccttggaatatagtattattttcaattggtatgtatatcgtcgtattcggcttaagaaatgctggcattactttaatattggctaaaatattagaatatatttccaattacggtctatttagcactattttgggaatgggcttcatttcagcgtttttatcatcaataatgaataatatgcctacagttttaatagatgcgattgctattggtcaatcaaatgtccatggcatgttaaaagaaggcctaatttatgcgaatgttatcggttctgatttaggtccaaaaattacaccgataggctctctagctacattactgtggttacacgtcttaacacaaaaagatgttaagatttcttggggcacatactttaaaaccggtatcatcattacaattccagtactatttataaccctcatagggttgtatctaacacttatcatattttaattaataaaaagacgctttctatttattgcgatagaaagcgtctttttatacttgagcaagttatatcataacttaactctatcaaattacttattcaaatgtttactgtcatctttatacacaaagtatttgaagtattttccttcagtcttcatgttcttataaaagtcagcgataattgttgcattactttctgcccacttaatatcagtagcatattgatgttctcctggattttttggattccatctcatactatacaatgtattttgatctgtgcttgataagaagtgcttatgaatgaaatcagcaccgcctgaaatagctttttcaggtgtatcccaaccatgctttttagcatattctgcacctgttttaattgggtctttatcaagggctcctactccatagaaattgtagtattttttgccatcaatttcgactccattagctaattcacttttaactgcgccagtttctaataatgcatgtgaaattaaataaacttcgttaacgtgcttatctttagcagcttttaagaaatcatccgtatgtttcaataacgttggtctatctactaacatacgtttaattctatttttatcaatcccttgatactttgataaatctaaaaattgatatttttgcttttcattatcgataaaagtaccgctatccattgcacttttaatttcagttgcagatgcatctctccatgcatcattctttttatttgatacctgttgactcgtataattatttatttgtttctttgctgcatcgtttaatgtaacatttaacttttcaatcttaatgtcggatttaacatgtttgaaaaatatctgatcggatatcattgagaaaaataaaaatgagacaacagcaaatatgacaacaagtcctattattccaaaaatagaacctttcttgtgtttattcatatccacacctcttaggtcattgttgttatacattcagtttgattacgataataaagtttaacattattaaaaccgtttaacaattttatctatgcattgttacatattcataaataaacagtaatgtaaatgaaacgttttaaaccatttatcaacattactttacgttgatttacgaatcataaatgttttttctttttgtataacctttgaaaacctttatatcaataatcttattattcacgtattaaaaaacaaaaaattctcttgttcgtttacttagtttcttttttataatccatcataataaaacttgctgcatttgatctatttttataatagtactgatttaaatcaatcgtaccttcaatttgaccatcacgatacatcatttcattagtgaagttatttatcatcacgaaatcagcgcgatctcttataacatctaaatcgtcgtttcgtgcaaaaaaatgttctaaatttaaatgtgcgtaatccattgttacctcccgattacaaattttgttctatctactatttagcagagtaataatacatcatatcacattaaattaattacttatgtcttatatttaacacttaatttagcgattacgcaaatgaatgatttttctaaatattttattctaactttatccggaaatatttgttatacgtataacttggagaatgactacttgaaatttaatgacgtatacaacaaacaccacaaaatcatacaccatcttttaaaaaaatataatattagctataattatgatgagtattatcaactactcttgataaaaatgtggcaattgagtcagatatataaaccctcaagcaagcaatctttatcctcttttttattcactcgattaaatttttaccttatcgatttattcagacaacaaaatcaattaaaagatgtcattttatgtgagaataattcaccaacattaactgaacaaccaacatactttaatgaacatgaccttcgtttacaagatatcttcaagcttttaaatcaaagagaaagactatggctcaaactataccttgaaggatacaagcaatttgaaattgctgaaatcatgtcattatcgctttcaacgattaaattaattaagatgtccgttaagcgtaaatgccaacataattttaattagtttattgtgaaatttcggtcgatgtgttaatgatgttgaaacaccctaacatcttcatataaatttattttaaccattaaattaacaacttattatacgaggagtactatatttgcaagacaattctactaaatatctactttatatccaaactgctacttcaaaccatctcgaaacaaattgtgtctttttacattgcgattacattcttaaagttccaattaacaaactcgtttcatattatgcgaaattgcatttatcatcacaaagtgtgctaattgagactgcaaaaaacatactaaatattaataaactggttcctatttacatcaacccaaaaactatactttttccgttaaaacataaacgtgcaccgatacaaatttatatcaatgcacattatattgttggtatgactgccatagagaattcaacattaatacattttcaagaaggcattcagctagaagttgatgagccattttctctagtttcaaaaaaatgtcatgaaagtttagctttgaagcacttcattgaaaatactatttcgaattaaatttaatttctaaaagtttcttagtaaagtatgatgtcacaatttttataaaatatatgctaacaatcattaataaaatcgctccaataattgttaaaataacaacagttgttgataaatctaccttaggactaacgaaaaattgtacgccagatagacttgtaattagcccaaataaaaacaagcctaataaagcaacataagcaaacatcatcactactaatgtaacaaacatactataactttttgtttctttatttcgaaatacattttgtcttaagtaagcattagcaaaggtaacaggcttatttaagttaacgctgtcatcatcagatatagaagacaatcgttgatctaatgcttgtttctccttcttgttcaaaaaccataattgctttttaacttttttatcaaatgatgctttattcataattaaggatttctctcctttataatattgacgtaattttaaacattagcgtcaattgaaagtgtattttatatattttacagaaatatatgtatcaaatctacaaaaatccatattacaatttcatttatggtgatttgacgctaaaatacagtctgctaattttccaaactaatgctttttaggtaggtacaatgataaattttaatcgtatatatgtttcatatataatgaatctatccttaaacatattgcattcaaaataattttaaaaaatgaaaagaaaggatttagcatgcaaaaattcaaagactttttttacgatgatttatcggttacacgaggaaattattttttaactttaatggcagcatttttattactatcattttatttatcggcatagttgtcagtgaagtacatttactttatagcatgctaattgtattagtaggtttaattctattgaggctattcaaaatcaatttattctcttttaaaaaattaacattgtctcaagttatttatattataggcggtgcactattaatttatgggttagataatctttatttatattttcatgacgtaccggcaaatgaacaacaattagagcaagaaatacgaaatacaccattctatatttctattttcactgttaccatcatccccgctattgtggaagaaattgtttttcgcggtatgataataagggttatcttcagaaaacacttgtttttagggttaattgtgtctagtttagtttttgcatcattacacgaatctgacacttggattggttatttaccttacttatattctggtttgatttttggtataatttatataaaaacaaaacgattagaagtggtaatattcatgcacttcttaaataacttgttagctctgctctttataatatggggataattttgagataacctttcatattattttcaaattatctatctgatatttattttattgaacttgagtcaccacttaaactcaaaaatacgtgtcatcaagtgcaaaataatttagaactaatacaaacataaaaacttttgctttacgcttaaaatcaaaagtcacatacctagatataagtacaacttgtatattttgtactctaataggtatgtggcttaaataatatttaattcttaagttgcatatagtaattgtttttattcattttctaaaatatgcgagactaatttccttttctactcctgttgaatcaatttagacttttttataactcgagcttttacttagctgaattttgacttcttcttcattaataactattatggaaaaacccccataagcacaatgcctataagtgtttaaatatatttatatattatagaatagaaagacctgaagattgaatatctttcgcaaagcctttaactgtatctactgataattcgttaatatcgcgacctaagtttgtattcacttttttcacaacatctgcagggcatgtaataatatctgcaccaatttcatcagcttgaatcacattgaataattcgcggcaacttgcccataataatttaacgccgtctttactatgcgtaacttttacagcctctttcattaatggtaatggatctacgcctgtatctgcaatacgtcctgcaaatactgaaacatatgttggcacaccttcagttactgcttcagttatttctttaacttgttcaattgtgtaaacagccgtaacgtttaatctcacattgtcagctgaaagctttttaattaaaggaatcgttgattcaccttttgtatttacaataggaattttaacaaatacattttcgccatattgttttagaattgctgcttctttttccatagtttctaaatcgtctgcaaatacttcaaatgaaattgaagcatctggaatttctttcacagcttcttcagcaaaagctttgtaatctgttacgcccgctttcgccattaaactaggatttgttgtaaaaccatccacttgtttgtttttataagctgctttcatttcttcaatatctgcaccgtccgcaaatacttctacatttagtttagccatataatattgcctccttgattcttattaaaattttaacaacatctgcatgtctttttcttacaaccatttgtaaaaaatgatttttatttctttgttatataaaacatttatatcacgcttttataatatatagctaattttttgcctatatttttaaaaaatgactttagtaaacattgtgtctacaagttaataaaactattgttttatgattgtttatgatacgatatgtaaatgataaccatccaggaggtctagcatgtctcgttcaaaaaaatacttttacttatctagcttaatgattattttaagctttttctttaatacaaataacgttttcctaagtggactttttaattcttttattaaattaatacttttctgcagtgttattaactcaattgtactaattttgtctataatttttgcagatcgttcaattaaatcactaaagcctgatgcagattggattagaattgcgagtaaaagtttgccttggattattctaattgttattttagtacatatcttttcaattgttcgtacattcggttttatttaaaaaagataaaatgtcaatgtagccttaatacaaaacaatacaatgtatcatgctataatgagtaaaacaatttgatgacgttgttgcgtataaaaaatattagattttcgaaatcataactatacatctaatcgctatagttatacaacaagatataacatataatgaggtttgataatgcatcgacaatttttgtcgtcgcgttgccaaaacctcttttttaaattcaaactacttcttttcgaggtgaaccaaatgcaatatgtatatatttttatcggtggtgctttaggcgctttattacgttacctcatttcttttctgaatactgacggaggttttccaatcggaacactgatagccaatttgactggtgcctttgtaatgggattgctaacagccttaacaattgcatttttttcaaaccatccgacgctaaaaaaagctattacgactggttttcttggtgctttaacgactttttcaacatttcaattagaattaatacatatgtttgatcatcaacaatttataactttactactatatgctgtaacaagttatgtctttggtattttgttatgttacgtcggtataaaactaggtggtggtttatcatgatatcaatcattttagtcatgattggcggcggtttcggtgcaattactagaagtgccattactgattattttaatcataaatttacttcaaagttacctatcgcaacattgatagtaaatctagttggtagttttttaattggattaaatataggcttatcaatttcaatctcatggttccctgcgttctttgttaccggttttttaggtggcttaacaactttctcaacgttagccaaggaacttacactaatgatgacgccaaaatttaatattaacctttttctcaattattcacttttacaattcatcattggatttatagcttgttatattggctatcatatttaaaaataaaatgcttcattcagcaaataggtaaattacgacaccttcctgaacgaagcattttttaattttcatgcaaattttttagcaccataaaatgcctaccaaatttcaataatctttgttaccgtttaaataatgtgaatgtcaataaattctccaaactagtcgaaaataaagggagtgggacagaaatgatattttctcaaaatttatttcgtcgtcccaccccggcaaggttgactagaattgaaaaaagcttgttacaagcgcattttcgttcagtcaactactgccaatataacttcgtagagcatagaacattgatttatgtcccagcctgtgacaatccatctaaccttttcatcagttgagtgattttaatctatccttcaaaagtttttggatcaggtccaattctcttatcttgatttaaaccatcaattcgcgtcatttgttcatctgataattcgaaatcaaatatttggaagttttcagagattctgtttggtgttaccgatttagggattgtaaccacaccatgctgcacattccatcttaaaacaacttgggcaggtgactttcctaattcttgagcaatgtctttaattgtctcatcatttaaaatttgtgcattcatcaatggtgaccaagattccatcacgatatgttgtgctgccaaatataatttcaatttatgttgcgttaaatatggatgatattcaacctgattaattacaggtttaattgacacttgtgccaacaaagcttccaaatgttcaggttcaaaattgctgacacctatatttttaactttattatttttatataaatcttccatacctttccatgtatcaaccattacggcttcgttcgtacctggccaatgtactagatacaaatctaagtattttaaacctaatctagataaactagcttcgtaagcagctgctacattttcacgaccgaaatcctcaaaatataattttgaagtaataaataagtcttctctagcaataccagttgactccaatccggcacgaatgccagcacctacttgttcttcattcccataaacttttgcggtatcaatactacgatatccttgttcaatggcatacttaacactttccatgcaattttcatcattttccacacgaaatgtccctaaaccaatttgtggcatcgtgtttccattataaaatgttttaacctccataaatatcgcctcacctttttgatgtattataccctgttatcataacaaatctgagttgaatacatgagaaaaaacacttagagcaatcaaccactaaaattctagtaatatctctcaaatattaatcaaattgtaaaagtaattctgtttaatttatgacaaactaaaaaagccgaagtaacaacatatagtcatcacttcagcctaacatttaattgaatgattcaattttatccatcatttgttgtaagtcttccacgttgtattgaatacgaccatggaatacaaatttgttaaagaactcgtctaattgttcagcaccgacaagcactttgacagcactattttgattataatttgaaatcgttacatcgccttcatttttaggattaaagtataaaattgaagttggcgtatatttggcacctaattctttttgtaagtcttcagccaattgtttaatcgcctcaatttgatctgaataatttacaaaagataatgaacgtttgtcatcattttgatccatcacaatagtttgtggtctagatttatctaaatccaatgtatcaaatacttgttccattggtggtaaatctttaaattgaccgccactaataccattataaacatgaccttttaacaattgagaatcaataatataaagaccagttcttgttaatactaaatgactaattcgttcaatattattaaagccatcctttggtaaaaagatatttgccataatgtgcatatcttctggtcgaattcgtttttctttaactaatctttcacgaataccaattaatctcatgtccgttacatattcactatgatttttcgagaacaattttaatgcgtcaatctcacgatcttttgtactaaccatgtgattataatcttcttgttgttttgtaattgtctttttattttgaatacgctctttctctaaagcttcttcatgagactttttaatgttttgttcttgttgttcatacttttcttctgtttgtcgcttaacttttttcttactacctaaggtaactaagaaaaggacaaaaaagattaatgcaatgactactgcaataatgagtccaatgactatcggtgaagataaatccatcacaacaacgctcctttttaatatatgaataactttaattataatagaaaagctaaagattttcgatacatattatcatttatataccgaaaatcttttatttagctatattcaattcatcttattattttactgcgtcttttaattcttccactttgtctaatttttcccatgggaataagacatctgtacgtccaaaatgaccataagcagcagtttgtttgtaaatcggttgtttcaaatcaagcattttaataatacctgcaggtcttaggtcaaagtgttttctaactgcttcgacaagttgcccttcagaaactttacctgttccaaatgtatcaattgcaattgacactggttctgcaacaccaatcgcatatgccaattgtacttcacattgatctgctaaacctgctgcaacaatatttttagccacataacgtgcagcgtatgcagctgaacggtctacttttgtaggatccttaccactgaagcatccgccaccatgacgtgcatagccaccgtacgtatcaacaatgattttacgtcctgttaatcctgcatcaccttgaggtccaccgattacaaagcgtcctgtaggattgatgtagaatttagtttgttcattaatcaagttttctggaacagttggataaatgacatgtgctttaatgtcttcttgaatttgttcaagtgtcacatcctcagcatgttgtgttgatacgacaatcgtatcaatacgtactgggttatcattttcatcatattcaacagtgacctgaactttaccgtctggtcgtaaataatttaacgtaccatctttacgcacatctgataaacgttttgccaattgatgtgataaataaattgctagaggcatatacgtctctgtttcattcgttgcgtaaccaaacattaaaccttggtcacctgcacctgttgcttcaatttcttcttcgctatctttatcacgatactctaatgctttatccacgccttgtgcaatgtcaggtgattgttcatcaatcgcagttaaaattgccattgtttcataatcataaccatattttgctcttgtgtatccaatttctttaattgtttctctaacaactttcggaatatcaacatatgttgttgtagaaatttcgccggcgatcaatgccatacctgttgtaacagttgtttcacaagctacacgtgcatttgggtcgtcttttaaaatagcatctaatattgcatctgacacttggtcagcgattttatctgggtgtccttctgtaacagactctgaagtaaataatcgtttgttatttaacatagtttgctcctttaaatttatattacgaaaattctctctctgtgagctaaataaaaaagaccttctaactattaatatagagagaaggcctaatacgtccattcgctcttatcgttcagacctatttgtctgcaaacggtttggcacctttcttttataaaaaaagaggttgctgggtttcattgggtccatgtccctccaccactcaggataagagaatccgttaaaaataatagtacctaattaatgaattaatgtcaatttttcacaaataaatttacagtaaaatattgtagattaattatgttaatgtgttatactaattaaatgtaaaggcttacatttaaattatcgctttggagggatttaggatgtcagtagacacatacactgaaacaactaaaattgacaaattactgaaaaaaccaacgtcacattttcaactttcgacgacacaactttataataaaatcttagacaataacgaaggggtattaacagaacttggtgctgttaatgcaagtactggaaaatatactggtcgttcgcctaaagacaaattttttgtctctgaaccttcatatagagataacattgattggggagaaattaatcaacctatcgatgaagaaactttcttgaagttataccataaagtactagactatttagataaaaaagatgaactatacgtatttaaaggctacgctggtagcgataaagatacaatgttaaaacttacagtcatcaatgaattagcatggcataatttatttgctaaaaatatgtttattagacctgaatcaaaagaagaagctacaaagattaaacctaacttcactatcgtttctgccccacattttaaagcagatccagaagttgatggtactaaatctgaaacctttgtcattatttcatttaaacacaaagtcattttaatcggcggtactgaatacgctggtgaaatgaaaaaaggtatcttctctgtaatgaattatctcttaccgatgcaagatattatgagcatgcattgctcagcaaacgttggtgaaaaaggcgatgttgcattattctttggtctatctggcactggtaaaacaaccttatcggctgatccacaccgaaaactaatcggtgatgatgaacacggctggaataaaaacggggtctttaatatcgaaggtggctgctatgcaaaagcaattaatctttccaaagaaaaagaaccacagatttttgacgcaatcaaatatggtgcgattttagagaacactgtagttgcagaagatggttcagtggactttgaagacaatcgttatacagaaaacactcgtgccgcttatccaattaatcacattgacaatattgtagtaccatcaaaagcagcacatccaaatacaattattttcttaactgcggatgcatttggtgttattccaccgatttcaaagttaaataaagaccaagcaatgtatcatttcttgagtggtttcacttctaaattagctggtacagagcgtggtgtgacagaacctgaaccatcattctcaacatgtttcggagcaccgttcttcccgttacaccctactgtttacgctgatttattaggtgaacttatcgatttacatgatgttgatgtttatcttgttaatactggatggactggcggaaaatatggtgtaggacgtagaatcagcttacattacacacgtcaaatggtaaaccaagcgatttctggcaaattgaaaaatgcagaatatacaaaagatagtacgtttggtttaagcattcctgtaaaaattgaagatgtaccgaaaacaattttaaatccaattaatgcttggagcgacaaagagaaatataaagcacaagcagaagatttaattcaacgttttgaaaagaacttcgaaaaatttggtgaaaaagttgaacatattgctgaaaaaggtagcttcaacaaataaatttgaatactaattaaagagccaaccgttgttatagtctaacaatggttggctcctcttattttatgtgctaaaaatttataggcaattttattacaacaatgcacatttaaggtgaccttcatgccaaactcgcatcactcatttaatggaagcagcacgtcttcacataaagtaccggttccttacgctatgcatgttgccctactttgcataaagtacttatcgttaactcaacgcaagttgttcctattcacaaaaagcacatacagttatctgcatggagcacattttcattgaaagcgcatacccctcattcaacgtatatcacacatcttcaaagcttgatagttcccatgcgcacaccacgtttcatactagctatgcaactcaacttggttcataaactctttaatataagtcaatgtttcaaccatcgctggtggtcttggcacatgtccttctgccatttgataaaatgtttcatgcgtggcaccttttaactctagttggtccgctaaataatacgcatgatgaataccaacttgctggtctttccctccatgtacaattaatattggcggactgttttcattaatgtttggaatcgcttggcgtgcctcatatgccgctcgatcttttttcggatgaccaatcattcttcgtagcatgcctcttaaatcgacacgttcttcatacattaaatcaatatctgagacaccaccccagattgtataacttgttactggtaagtcttgaaatgtcaacaatccttgtaaaccacctcgcgaaaaaccaaccatgtggataaatgcatgtggatatttatcatgtagcaaccttaataattgcgtcacatcatttaaatcgccacggtaaaattcgtctttaccttcactcccattgttacctcggtagtatggcccaatcactaaagtttgactatctgaaaattgcattaatctacctgcgcgcacacgtcctacttgacctttgccacctcgcaaatatactacaatgcgatttacttcatgatgtggtgtcatcattaaagcttttacttgtaagtcatctgacaaatatgtaatttcttcgaattgatgcgtaaaagattcaattggcattcgtttacgtttgataaaacccaagtgattgcaccctctctacgcattttaaaatggtactatcttgcagtaagaaactccgttgtgcgagttcaatatcattgatacagttaaacaacactggccctgctgtttctaaataatcgttcttgcttaccaatgattcaacttcgataaaatatacatcttttacaaaatcagtttgatcatgtgtttcaatggtatattgtgctatgtaatgaatatttttaactttggcgcctgtttcttcatataattcacgggtaactgcttcagcactactttccccgcgttcccttttaccaccaggaaattcaataccccgtaaattatgtttggtaaaaagcaattgatttttaaacgttggaatagctagcacatgattgccatctgctatctcattatcctttttaaatgtcaaattaacttgacgattatctttatccctaaacttcacgcgcatcacatccctacattgtatgttaatataatagttaattactatcgttggaggcattaattatgaaaaagatattcttggcgatgattcatttttatcaacgtttcatttcgccactcactccaccaacttgtcgtttttatccaacatgttcagagtacactagagaagcgattcaataccacggtgctttcaaaggcctttatttaggtatccgtcgtattttaaaatgtcatccgcttcataaaggtggctttgaccctgttccgttaaaaaaagacaagtcagcaagcaagcattcacataaacataaccattaatatggttgtaattgagttatatccactaaaggggggcgaaattcgagtcgcccctcttttaatatgcctgaatgcgccaccacatcttgttcaaaataataacctgctggtgtaacatctcctggataatcacctttacgagcaagcatcgctgtaaaataacggcttaaaccatattcgtacatgccgccaataaccacttttacaccatgacttttcaaagtatcaattgccgtttgcactttatcaatgccacctagacgaaatggttttaatacaacaactttcacattgtataattctatcaaattaattatgtccaacaacgatgttgccttttcatcaagggctattggaggtattgttccatccactacttcatcaagcatggagatatctttaaatggctcttcgatataaagaacctgttcacgcgctaataactgtaactgtgtgaaatcttgacgatccaaggactcatttgcatctataaccaattgaaagtgaaactctaattcccgtaacactctaatttgatgcatgatttgaggtgtccattttaatttaattctggccggcttagttgcttttaatgactctagttgtttatttgataagccgctcactgtcgctccatatgctactgaaaatgaaggcagtacatgaaacatttgatacaatgccatgacaatagttgcccttgcagcaggcgtattttccaatgaatctactaattttagtgctgcttcatacgtttcaaatgatttatttctattatcttcgaaccattgctcaattacatgtttcactgaagcaattgtttcatgatcataccaatctgtttgaaaagcgttacattccccgaaatatgcatttcctttatcatcaatcaattcgataaacaaacaatcacgatgtgttaaagtgactttcggtgttacaatttgtgacttaaatggctcactatatttataaaaatgcaaagctgtcaacttcatcaaatcatcctctatacaacttatttctttgtaatttacctgttgatgtataaggtaaagtatcaaccttttcaaagtgtttcggtactttatatttcgctaaatgttgtgataaatatgcaatcaattgtgcctttgaaatgtcactttcactgacaaaatataatttaggcacttgtccccaagtatcatcaggatgccctacacatactgcgtcactgatacctggaaattgcttcgctaccgtttcaatttgatatggataaatattttcaccgccactaataattaaatctttacgtcggtcataaatcatgacataaccttcatgatctatttcagcaatgtcacccgtattaaaataaccattttcaaacgtacccgttaaatctgttggatacaaatatccattcatcacattggcacctttaatcattaattctccatgaccttctttattaggatttttaattttaacgtctacattggcacttggcatccctacagtgtcaggacgtgcatgcaacatttccggtgttgctgttaaaaattgtgaacatgtctcagtcataccaaatgaattataaattggcaggttatattgtaatgccgtctctatcaaagtggcagataatttagcaccgccgagtaatattttttgcaaattataaggttcatgtaaaccttgttgcataagccaatttaaagtttgtggcacaagcgaaatgtgcgtgatgcgttcatttttaattatcgttaaaatttgttcggcattgaatttatcaacaatgcgcacagtaaacccttcaataacagctcttaaaagtacactgagacccgaaatatgataaatcggcaagacagatagccaattagtatcacgatcaaatcccaagctctctttacatccgattgcactggcataatgattacgaaacgtttgcggcaccgctttttgagggccagttgtccctgatgtaaacataatcgatgcaatgtcatctaaattaaatgaagtatttaatatgttggacggcgactctttcggcaccacagtttcattcgatgtatcatattggatatccattgtgttgtccaacaaaccgttcattgtaatatccgttccagcgaattcaatatcatccagcgatacaatttgaaaccctcgcaattccagtggcaaggtacaaaaaatcaattgtacatcgattgacctcatctgattcttcatctcattaggtgtcaaccttgtattaatcatcgcaatttcaatatttgccaaccaacaagcatgtattaaaatgatcgattgaatcgaattatctatgtatagcccgacacgagattgttgataagccttgagtcttttagccaatagactcgcttcacagtataaattttgataagtataagattcttgaccgtctgttatcgcaatatgatgtccattttgttgtgcttgtttatataaccaaaagtccatacgctattcctccaaattcatctaccttataattataacgattttatgacattctagcagtggttatgtttaaaaatataaaaaagtagacgaattgatgcattgatatgattgttataatgctcaatacatatcgttatatcattcgtctactattatcagttatttttatttaattttagtgtcattctgtcattttgatgtggtgatttacccattgttgccacatcatctgcaatgtcaattggtatacgattcatgtcttgtaatacacttaaatggaatacttcatcatctaaattttcaatgagatatacataatatgttatcttatcctttttatattttaacgttttccaaaagtccgacttgcaattcaatacattatccggaatatattcaataaataagtaacgtttgctgcctactttgtctacgaaatattttacagtgcctttttctatacctcttatatgtgcatagtctgctgaaaagtaaatactacctattgtttcattatgttgttgtatttcaaatcgttggcctactattttattatttgtgccacaactacttaaaaaaatcagtagatatagcattaaacatattttcatccccttgaattttaaagactttttcaaaagcaacacctctaaaaataaatacaatatattatatcaaatagaaattattattttgttaaattatgttgtcatgttcgtgtcattttgagtcgtaatacaactttacaattattaaattaacacttctacaatccaaaaatatttttaaagttttgaaaaaaattaaagtatttccactactaatttggtaaaatatgattatgtgatatagtgaaagcgttttacacttaataactccctcttaaatgcatccaggttttatgtagtaaatcatgaaaataacatataaatatagaggagatttacctttgaatacagagaacaacaagaatcaaaaccgatctgttaaaaattctgaaagacgtggcatgttaaaaggatgcggcggttgccttatttctttcattttattaataatcttattatcagcctgttcaatgatgtttagtaataatgacaattccactagtaatcaatcatcaaaaacgcaattaactcaaaaagatgaaaataaaaatgaagataagcctgaggaaaaatcagaaacagcaacagatgaggatttacaatcaaccgaagaagtacccgcaaatgaaaatactgaaaataatcaacatgaaattgatgaaataacaacaaaagatcaatcagatgatgaaattaacacaccaaacgttgcagaagataaatcacaagacgacttgaaagatgatttaaaagaaaagcaacaatcaagtaaccatcatcaatccacgcaacctaagacctcaccatcaactgaaacaaacacgcaacaatcatttgctaattgtaagcaacttagacaagtatatccgaatggtgtcactgccgatcatccagcatatcgaccacatttagatagagataaagataaacgtgcatgtgaacctgataaatattaaacaacaagcgaattgaattcaaattgtatttagctttatgcactaatcacatagtaaataatgagggagattttttaggcatgagcaatcaattcaaaagcgaagaagagcgaagacaatgggaacaattccaagctttccaaaatcaacaaaaccaacagaaccagcaatacggacaaaagaaatctaaaaaaggatggttctggggctgtggtggttgtctagtattatttattttaattatcatcggtatttcagcttgtacagctggtattacaggtaaccttggcggaaatagttctaaagaaacgaacaaaacccataaaattggagagactgtaaaaaatggtgatcttgaagtcacagttaattcagttgaaactatgaaatcagttggtccatctatcgcgccaacaaatgctaaaggtacatttgtcgttgctgatgtgacgattaaaaacaaaggtaaagaagcgttaacaattgatagttcaatgtttaaactgaaatctggtgataaaacatttgaagcagataatacaggctcaatgtctgctaatcaaaatgacaacggtagtatagaaaattcatttttcttacagcgtataaatcctgatagcactgctcaaggtaaaattgttttcgatgtgtcagaaaacatagccaacgcaaaagataaaaaattagaagttatttctagtttatttagcgtcaagaagattacatttgatttatccgatgctaaaaaaacatcaaaagctaaaaaagacaagcaagatacagaagtagctgctgcgagttcaaatagcgataatgtaagttatgaagcttcggctactacacctgctacaacttctagtgcaaataatgattctgaagaaaatgaacagtctagtaaagatgaagataagcagaatgcgtctaaaagtgataaatctagtgtagaaaaaagtgaatctaatgaagaaactgctactgtagaatcagcacctcaaagcaaacctgttacaagtgaagcaccacctaaccaaaataatcacaacgaagatagcatgtacgacgcttcaacagaataaaatttcagggtagctcggctacccttcttttacggaaaaataagtatacatagcaatataaggagataaaaaaatgaaattcaaagctatcgttgccattgcattatcattgtcactattaactgcttgcggtgctaatcaacataaagaaaataatagtaaatcaaatgacactaataaaaagacgcaacaaactgacaacactacacagtcaaatacagacaagcaaatgacaccacaagaagccgaagatatcgttcgaaacgattacaaagcaagaggtgctaacgaaaatcaaacattaaattataaaacaaatcttgaacgaagtaatgaacatgaatattatgttgaacatctagtccgcgatgcagttggcacacctttaaaacgttgcgctattgttaatcgacacaatggtacgattattaatatttttgatgatatgtcagaaaaagataaagaagaatttgaagcatttaaaaagagaagccctaaatacaacccaggtatgagtgatcatgatgaaacagatggtgagtcagaagacattcaacatcatgacaatgataataacaaagcaattcaaaatgacataccagatcaaaaagtcgatgataaaagtgataaaaatgctgttaataaagaagaaaaacacgataacggtacaaataattctgaagaaactaaagttaaataagggtatactttgattaatcgtaatttttaggagaaccgctatgataacatttgaaaatatacaacaacttgaaaaatacaccttaatgactatgcatggtctttttaatcaacttaaactcggtattatttcaatcgacaatgcagagcatacgctctttacaccttatatgatggaaacactctcttccctaggcatgaaagacagcattgtcgatttaattcataaagggactgaattagaagactttgcagcatttaatttatcaattgaagatacagttacagtctgtttacaaagaactgaagaactattaaatcaatacaaaaatgtggaattcaatgacaaaatattaatcaattggcgtattatgcaaaagtaatagacatataaaagtcgaacgtaactaaatggatattgattttattctttctaaattacaagtatttcattttataaagtttgaaaagaggtatattgaagtggagaaaaatgaatatatagctaaatataatgaatatagtcaattattagacgctacatactcgcaagccgtagcataccttttaaataaatatggcgctgtaaccgatgactattataaggaaaaatcatacacgcgatttttaaatggagaaatcaaaagtattacaaaaggaaaatacactagagctggtgaaggattatattgtcatcacataagcgaagacaaattccaaaacttatctgacctaagattcatttccgaatttaagtactcatacaactatcaaaagaaagaaaacttagtttactgcgatttaatcgagcatttaattttacatgcaattattacaaaagaatccaatggccaatttggtgtggctggattatgtcaaatgatcaaaccaacagtcattgattggtacattagcgaatataatccaaaaccagcatggatgcaagccaccaaagcacgtgcctatttgcctagaatattagtagagaaactactcattaaaattgacgatatgttaaaagaaatagaaatatatgatttccttgagtctagataaatgattaatggagatttattttttgctgttgagattttgttatagatgtttaaacccataattaaatatattttataaaaatagaccacgcatacctatctttaaacggacaatgtttataaatgagtttgcatggtcttgaattgtattagttttcttttggttttaataaatcgactagattttcacaatatttatcaaatatgtattcctaaattatacagccttaatccagcagctactttcgaaacttccaacttagttgatataaggttcaatagtttgtttcattctttttcagataaaccagaacttaaattgatattattgacttcataaaaattatagactaatgcctctatttgcttttttggcataagtaagtcgactgaaaactgatttacgtcgctttcataaatcatttcatgtaaattctttagactattatcgttgttatctttaattttgtataaataacggccgagttcacgagctattgcaaatcttgtattattaatcgagtgattattattgatataaatcgttcttccacttaaataacccgaagtattaccctccattttaatatatttaacttttaaattaagttgaaataatagcttgtctatgtcaatagcaaagtgttcagaagtaataaaaagttgatccattttgtccttaactaatggctgaattaattgaactatttctggttctaaaatatcttcataatgaactttctcaataactttcaattgattcccctccctaactaaaaaatcgaacctacatcatttaataaatttaaaactataggtgtaaacattattaaaataaaacccctccactactaaatgtaacggagggacatgatttcaaaataaaatgtcattttttataaatttattataatatttttcatcatactgtacaaccgaatctaatccaacgatcccgaaaagaggaacaacggtggttctgcttcataatcacttttaactaagtgttcatttttaattatttgatcgacggttttccaattttttacttcttgctcttttaaaaaaatggctatgaaaaattctatcctcatagatttcttcatagccaatgctaatttttttcatgtcatttcttcaaaattcctaaaaatatataaactaaaagcataagtaacacagcaaaaattgatgaatatataattattgaaaaagcattactttgcattggaactaaataatttaaagtacaaaataataataatgctaaaattccaactttaagtgaatattttaatctatccataaaatcacccttactgatatccccatttttctcctgtcagaacgtattccccggctgcattctttttagtttttaattttatatatactcccttactagtatcaatattcgatgcagctatagatccaaggaaaccaccaacacctgcgccaactaaaccacctgttagtgcagaaataacgctaatagcccccgcacctaaagcagctattgtttttgtatatgcagaagaaagatataatgttgcagtatctttacctgtttctacatattgagttttacccgctcttaattggtcttcagctttatatttttttatttcttcttttgtaaatatatcttccagtttataaccttttttctcaagttcatcaaataaattttggttactcaaatatattacctttgcttgagaatggtctaacttatcttcagcatgagctacatctgaattataagataatgaaattggactaacaaataatacaccagcagctaataataaagatttttaattcgtttttcattagtttcttttagatgatttttgtatttagatttcgtataaacagaaactagattttttcatgatcgacctatcttttgtccagatacagtgagacccttgtcatttaaatgatttttaattcgtcttgtaccaaagacttttctattagaattaaaaatatttatgacggcatgttctatgtttgaatcatctttagtgattttattatcttttctttttatagaatcataataggtacttcttagtattatcaggactttacacattgctgatactgaatattgatgtgcattcttttgaatgacttctatttttgccccataatcagcgctacttgctttaaaatatcgttctccatttttaaatgttgaacttctttgcgtaatttaatcagctctttttcttcatccgataagttatcttggtgattgaatgtacccgtgttttgatgttgctttatccattttcctacattttataaccgccatttacaaacgtcgaaggtgtgaaatcatactcgcgtataatttcattcctaggcttaccatttttatataatctaaccatttgtaacttaaactctgaactaaatgatcttctttctcttgtcataataaaatcgcctactttcttaaattaacaatatctattctcatagaatttgtccaattaagtgtagacgattcaatctatcagctagaatcatataacttatcagaagcaagtgactgtgcttgtatatttgccgatgatataatagtagagtcgcctatctctcaggcgtcaatttagacgcagagaggaggtgtataaggtgatgcttattttcgttcacatcatagcaccagtcatcagtggctgtgccattgcgtttttttcttattggctaagtagacgcaatacaaaataggtgacatatagccgcaccaataaaaatcccctcactaccgcaaatagtgaggggattggtgtataagtaaatacttattttcgttgtcttaattatactgctaatttttctttttgtaaaatatgcaaggttttaaagagaaacatcaagaactaaaaaaggctctatgtcaaattggactgatgcgttcaatatccgaagttaagcaactaaacattgcttaacttcctttttactttttggagcgtaaagttttgaacataataatattcgattgcgcaaatgattgtaacttccataaccaaaagatgtacgtttaattaattttattttgttatttataccttctaaaggaccatttgataaattgtaataatcaatggttacactattaaaagtgtcacaaattcttatgaatctggcataaactttgaattaactaaataagtaagaaaacctcggcactttatcattttaatagtgtcgagatttttatagatactacaaatatttataacatagttaaactcatctaatgacttatatttttgtttcatcacaatatgaacaattatttattggacgtattttgctctttttttatttcagaaactgacttaggatttttattaaattttctacccaattcatctgtataagaaatatcggtatcaaattgaaaatcatcaacagatcttataccagctgtaaatgataactttttatcattatttatataaccactaatagaataaccatccattgggttttctttaaaattagcgaagcttatatttttataacctttcacattgtacttcatataaatcgttattctttctttttgttcatcatattatttcttttcgtcatatttcatcttcaaaaagattccgcctagaatcaatattaaaattataattacaatcataagatattttttattcaaaaaatcaatctccttttcattgtacttattgacgaacattttgaataaattaagcatattgagttttacgatgattgtataaacgttacaacccatatgattgttggttttaacattagtcaatttttctttcttataatcttaaatcatgatttggtttactttaacacttaaataattatatttttatccattctattcataacatttattcaattggacctgaaaagaaaaacaacggtggttccgcttcatatttgtcaatagcggtttaagattggcgtgttttaaatacttaatcactttcaaaatctttttagtcagtatgattcttctataatcttaaagattttcatattataatattacacattttttcgaaatcttatttaaacttatttactagtttccttgtggattgttggttgtgttttagaaattcacgtcacaagttcaatataaatattgtttttttactttttataaaagtttgagcggtggcataaatatatagataaatctaaaaattacgcctaatttttgacatgtcattcttaattattttcttattatatttgccatcgtcataaaaaacattgtaccaccattcttgtctatctcgaagagaaattttttctagatatattttccatccaatagacaattttttagtattaagaaagtttaataaactttcttttttaataagtaaacattcattatcaaattcgagtaatttagaattaatacatattgtttcaccaaatttagttttccatactccttcttccgtttgtattaatgaaaaataatctactatttctttacacggaatataaaaacttattgatttgtccttaacagaataatctaactcccaaaaatattcataaatagctggacataatttaccatctgattcagttaaatatccctctttataatttttataagcttcgctccaataatattcatataaatatatactatgtgctcgaggaatattaatacctctatcataattattttcataacctttgataatttcattactatcttctttattataaaaatatcccatcgctaagaaataacatgagtctctatcttcaaatggtatttctttctctctcttttcaaaattaaactttgagcttaaacatatatatctatgattgtctatatctatttctaaaaataattttgtttcatcaaaaactttggtattttttacccattcattcgattgatgcgaaggaagtggtgagggtactagtatttttgattctttatcaatttcaagtaatagtaaagtaggatcaatatctctaatataatcatcccatagtccagaatattgaacatcaggaaatttatctacaagtttagctaaaatttcatagtaagcaatccattgatattttttgctaattctttcaattgaattattaaagttatcataacgattaacccacatatcaaattcaccatgtaattttgcatcataacccatttcaaaaatcctcattaatgctatattacttaagtcttgatcacttttaaaaccctttacccagtttcgtacagcataaccaaatacatatctgccaaaatcgccatatgccccagttcctcttccatattccgttgtcattgagtttttaattttatcgatagaaaaatgtaaatggctatctaatttgttttttaaagattttatgtaatcgtctatatttaaattcgaatattcttttttataccaattacttttataaggtggcctaattttttctaaatttatattagatatatcttttgataaactaatatattcaattgtttgcctagcataatctctcattaaaatatgaggatataccatttctttatcaaatatttcttcataaatataattagcaatctctatatgtatttcacaaatgtcgattcgaagtgtcgcccctaaaacagaagcatataatctttcgactatatatggatcattgttattttcaaataattttaataaaccaataattttagttggaaatgttttgaataattttactaaagatttagtaccgagatctcttaatttattattagttgcagaaaatatccacgttaaaaaaatcatatatttttccgcagtttcttcatctaatttcttatagttactaaatagccaattaataatttcaaaaaccttttcattatttatagatatatattgagtccataaaaaatctctttttcctaaattgcattgtttcaataatttatgtaaagcccaaatatttaacggatggtttttttgaggcatttttattaataagacatctaaaaaattatttctaaatgcatcataaggaataacattatcggatatatagcatttagtatgtttacttatgctaccatcttttctccatactaaactatttataaaagaatatatcatgttataattgtttttaaactgtggaaatacttcaaatagctctatattaaattcatttgctaatttaataaaaagttcattaataagacctctattataagataaatcgtcttccttttgaaaataccttgtcactttttcatctgactgtaatttagttactaaatctcttttatcaacatttctatatttctctaaaaggtattctgataaaaagtaatctcccatacgctcatacgaaaaataaataatcatttcacctttatagccagtatttttaattaatatattttcatctattagcgcttctaaaaatctatttgacttttgaacatactctttagctatattattaacaacagtataggattcctcataatttagttgattaaattctgagtcgttcattaattcaactaatccttttattactttttgtacaacattaatatttttatcaaaatcaaatttatcttccttagataaattaatatttactgtcttaagaacatttgtaaatagctctgcaacacttatagtttggtcaaattccttaaatttatttacacagtactcacacattagttttaaaaataatggattgttgaattctggatttaatataggtaacttaggtagctctaatccataaaaatcacaaaaagatacaattggattatagttttcttccttactaaaaccttcatgctgaaatactacaatattgttatcttgtattgcgtttttgggtaatataacatcttcaaaaggggttctaatagaaaatattaaagctatattagaatacttctttatatggttgataaagctttgaaaataatttccccataaccttttaccttcaccttcattaagcgcatcaataataataaaagctctttttttgtttctttggccttattacttattgaccttaaaaaattatcaacagaatttgtaacttctaaatcattaagtatttgatgccatggatcttcatttttagtaaaaaattgtcccaaaaacagataaataatatgattttcatctctaagttttttagatagatgcgctaaaaggtgtgattttcctatgccagcttcaccttgaactagcaaataaggataaaacaagcattctttacatgtttcttttaaatacgtttgatattttaataatactttttcgattttactcatataagtttgaagttctaatttttcattctcacttattttgtatatattacattcattatgttctgtcagaaaaatataagggtcaatattaatttcgtctatcaattcataaatttcacttaagtattttttcttttcttcaaactcttcttccagttccaaataattattgactgattgttctaaattagagaatatttttttgaaattcaaataaatattctttgcgtattttgatttcatcttatctaaaatatcattttcgatataaccttttaattcttttagatatgaaatattagtatatttaaaattattggtaatagaaataccttctataattttattattaatagtatcgacatcattattcgcagtatatcgtgaagctaaattcgatatattaaattctaatttttcattaataaattcttcttttaaatatgacaaagaatcttcaaataaaagcggagataattctttttttaataattcaatagcgtgatcttgcttatttatgtttaaattcaaaaactcttcgcataagtcttgagttaaaataatatcttttttactatcgaataatatattatgtggatttgaaaaattcttatttttaatattattattttgatttccaataaatataaactttaatcgataaccttcttccattttatttgttaaatactctttttttagagtgtcctctattttttgctttttacacgttgcggtaacttgaataataattttattcgtattatctataagatcaaatgctggtgcatttttttgttttttattatgattctcaagtgaatacccatatacaatatttaacaggtctctaaaaaaatattcggaatatatatgattatttaaaatatttatctttcctagttcttcaatcttagtattaagtctaattagtgtatcaagaaatttttcttgattcgttgatcgtttcaagttttaagtctccttttaaaatgaatatttcacttcttataactaatatttaaacaaaatgatcacataataatatttaatttacaatatgccactacagtgtcaacattttataaacactattcatttgaacatggtctaaaacgaataggacattgtaaatgattaaatagtctgtctctagttgatgtatatggtcatttgttatgcagataataattaatctaattaatttttacgttttagttacttggttgtgattgaggctttttgtatctagttgtaatattctccttttttagaatcataataggtacttcttgaaatttttagaactttgcacattgctgatactgaatattgatacgcattttgttgaaagacttcattttttgtctcaaaattagcactgcttgctttaaatcatcattttacattatcaatcgatgtttttctttgcgtaattttattaactctttttcatcacttgttaaaatgtcttgatgattgaatgactcagtattttggttttgttttatctaatttgagaaagttaatgatgttagatcatattctcgtataatttcgtttctaagcttaccattttcataaagtttaattattttaatttaaattatttactaaaagctcttcagtctcttgtcataataaaatcgcctaccctcttagtttaacaatgtctattctcatagaatttgtccaactaaatgtagacgattcactaaacttctaaaaaaataaaccccaaattataatagtctcaatattaatatattacaatttattcataggatttttatcatttcaattaataggttgttatcagggttaaataaacattttttgtaatagttcttttttacgttcttttaataactcaattctattcatttgattattcattttattgtctatagattttaacaatgcacttactttatcttgttcagtgagacaaggtattttaagatttatattgcataagttcgcatgagttaatttagctggtgcattacctgtgacaaatgctcgtagttctttaaaatttaaataataattcataaaaaacaaattatgatcattacttttaactacatgcgcatgattatttacccagtattgcccattagcaataaagctactcgtctcaaactgcccccattttgcaccatcttctcctattagtaatcgttcttcattattgaataaataatcttttacgtaatcaataattccagttgcaccatagtaagggtataaccccttttctcttaatgaagaagtaattggttttcttctattattttcaaagataaagatgtcttttatgaatttgttttcccactctggatattcttcaccattctcatctttgaatcgcaattcttgtgtgaagattttctgcatatagccttttttctgttgttgaagcaattcaagtttttgttcttctaattcaatttgtcggtcgagtttgctgaagaacttgcctattttttgctgttcttcaaatatagttggggtgaagatttttaaattagcaatttctttgaagtttagaccttctcgactacctccactttgtgcaaggaaaattttccttttaccttttcttgataatagatactgtccaaaaaaattataataatactcttttttcaatctaataatacatacatgttgatttaaattagcatgcgtttcaactatcgaattaatggctgttctacctattgatgctcctgtaatatttaaaagaacatcaccatagtacgttctactatttttcatctcatcatctatatctttactaatataaactaagtcattaagatttaatttaccatttctaatattttgactccttaaaaatggtatgcctttgtttgtatagttttcacttccacctttgggagtctttccactacctattttggtagtaagattccctaacttcttctcttcccattcgccctcaaatcctgggaatctcaactctggcacatttttcgtttgtgtattactcatctttcaacaccccaagttctttcaggtatgcattgatttcttgttcaatttctgcgatttctttgtcgatatttttcaaatcttgttggacttgatctaaatcaattggtgcttcttcttcgaatgtatcaacatatcgcggtatgtttaagttgtaatcgttatcggcgatctcttgtaatgtcgcgctgtagctatatttatcaatcgttgctttacgcttatatgtgtctataatacgttcgacttgggcatcgcttaaatggttttgattttttcctttttcaaaatcattggatgcatcgataaatagtacgttgtcgtcttgttggcgacattttttaaatactaaaatacatgttggaatacttgtcccatagaaaatattggctggtaacccaatcacggcttctaagtagttcttttcttctattaaatagcgacgaatcacaccttctgcggcaccacggaataatacaccatgtgggagtacgactgccatggtaccttcatcgtctaggtaatgtaccatgtgttgaataaaggcaaagtctgctttggattttggcgcaagcttgccgtaaccactgaatcgttcatcattttcaaattttgaatctgctgtccatttcgcactgtatggtgggttcgcaataaccgcatcaaatgtattgcctaaaaaggctggattttccaatgtgtcatcattacggatctcgaagttctcataacgcacatcatgtaataacatattcatgcgtgctaagttgtatgtagtattgttacgttcttgtccgaaataacgatacacttgcgtttctttaccaacacgtaacaacaatgaaccggaaccacatgttgggtcgtacacgtgacgtaatttatctttaccgtctgtgacaatcttcgccagtatcttagatacttgttgtggtgtatagaactcgcctgcttttttacccgctgtcgccgcaaagcgcccgattaggaattcatatgcatcacctaacatatcaatttccatgtcactgtgaacgaatggtaagtcgtcaagattaaccatgactttagagattaaagcagtacgttctttgacattgttacctagtcgcgttgaactcaaatccatatcgctgaacagcccgataaagtcattttcactttcttcacctaatgtagatgtttcaactttgcgaatcgccgtcgctagatgttctatatcgaaatcttgcgtttcaatttcacgaatcatcgcactgaataaatcttgtggctcaatgaagtaaccgacttgatcaattaattctgcttttaagtcttcacgatattcttcatctgcccatgcttcttgatacgtgatgtcttcacctgacaaggcatctgcatattcttgttcggctttttcagataagaagcgatagaaaatcaagcctaaaatgtaattacggaattcactcgcatccatgttccctcttaaatcattcgcaatcgaccataattttttatgtaattcagcttgttgctgacgttgtttttcagtaatagacatgtgattcctccgcctttgcataagtaatttatctctttgtgtaatagatttattataacatttggttatgttgcgatgttgataatttggatgttggtggtggaaattttgagttttagtggcgcaattgttattgaaaaattttatagaaatgttgtagctttcaaatgctttcaaaatcatttatattcttaatgatgtcaaaaagttgttcattcatacataaataaaaccaatcaacaattgagttggtgaaaatcaatcgttgattggctttgatgcatattaaataatgcaatatatattaataaatgttagttatagtatattttgtcaggattgggtgaatgtctaagttttaattatttatctaaattatctgcaatgaatttcttaatttcaggagagaaataaacagcaaatcctcttgtgctttcacctgatggcttattaccggcatagattacaccaatagcttcgtgtttactatttaatataggtgaaccagagctaccaggctgaataattgcatccgatgacactatattcccattcactgataatactttaccagttgattcatacatttgtagtttatttccattaggatttggataaccaatgactgatataggttcattttctttagcttctgatgctatattaaatttactagtgaaatctttgaattttctaccttttggttgtgttgatttttcttcaacttgtacaaccgcaatatcttctttaccaggataatctacaatcttagtaactttataaagtccaccaccgttattataaaaaccattaggatgtgctttgatttcatcaccgactttcatgtgataggtaacatgtttattggtaatgattgtatgatttccaactacaaatcctgttccagcgcccatccatgtaacaccactgtatggtgcaacatttgtatttgtaatttgtttaacagtattttcggctttggctgtttgttgaataccatcaaccactgttgtgccgacaccagttattgatgttaaaatcgtcaatgccgcaatacttttgatgattatatttttattcatttttgtgctcctctgtttattcatgatgcttttgatatagacgtttttttatgttatattcgaccgatgtttttcattaaaattattgaacacatgctcatggtgtatatttaaatttgtttattgttcaatgtgcttttgaataaaatctttgatttgaggcgtaaagtatacggcaccattatattcagaaccaatttttccaataccgccatacaccacacctatgacctcattgttagaatttagaactggtgatcctgaattcccgggttcaatgtatgcatcaaaatttaaaatattgtctttgattctttttatagttcctgtagattcaaactgtttaaaactattttgagcaggtaatgggtaaccaataactttaattttgtcatcaactttagcatctttcgcaaaatttaatgcttggacattttcattaaaattaaagccttttggtccacgttcaactgcttgttcttcaatattcatgacagagatgtcttcatcacccggataatcagaaatgcttttaattttatatataccaccatttcctttgtcaccgtctggatgggcagtaattctatcgccaactttataatcttttgatacatgtttattggtgataattgtattttttccaattacaaaacctgtcgcatctttaaatgaaacgacgccattatatggaaaaatatttgtatctttaacttgcgtaacattcttctctgcatttgctatttgttgtgtctcttcaacgactgcagcatttattccagttgctgaggttagaatggctaatgctgccatgcttttaatgactatatttttattcattttcaagctcctttacaattcgagatatgttgcaacgctcgtttaaagtcaatttgtttatttatctatgttttctgcaatgaattttttaatttctggtgtaaagtagacgccatatgcatttctgttatcatcattttttacatcagaagcaaaatgaataccaactaattcgttgttgctgtttaatacaggtgatccagagtttccgctttcagtatgcgctgaatatacaatactgctaccttctactgacatcacagggccagttgactcatataaaacatatttatttttgtatgggtgtggataaccaatcactttaattcgctcaccagctttagcccctgccgcatatttgaatggcgttacattatcattaaaattaaagccttttggtccacgttctattgcacgctcttcaacttgaatgactgatacatcttctttacctggataattaataatctttttaatcgaataaataccaccattacctttatcactatttggatgtgcagtaattctatcgcccactttgtaatttttcgacacatgtttatttgttaaaatagtattctttccaactacaaatccagttgcacttttaaaagcaactacaccagtatatggaaaaatatttgtatctttaacttttgtgacattattttctgctttggcagtttgttgtacttcctcaaccaatgttattccaatacctgttacagatgttaaaattgttaatgctgctaaactcttgatgactacgtttttgttcattttaagttcctcttttttaattattttgatatctagatacataattcagtatatttagttaattatgtaaccgttttcttaatcactctttaaaaaatcaacttcacgaatgaattgatgatacttatttttcaatattattttgaataaattcttttaattgtggtgtgaaataaacaccgaaattcttttcagattcatcttttccactacctgcatataaaataccaatcagttcatgtttagaattcaatacaggagatcctgaattacctggttgtgcatacgcatcaaattccataaacgttccactgatatggttaatcgttcctgtcgattcaaacattttatattttgtttgtgcaccctttggataaccaataacagaaattctatctttcacttttgctccgtctgcaaattttgtataactaacgttcttattaaaattcaaaccttctgtacttgtttcatgaacatgaactatcgcaaggtcttcttttccgggatattctacaatgtctttaacgtcgtagtttcctccgcctttacctttactcgaatgatgtgctgatactctatttttaaaaatatcattacttttagcgatatgtttgttagttacgattgtatttttaccaacaactacaccagtaccacccacaaatgctaccactgaattgtatggttccttagttgcatcggtaatttctttgacattcttttctgctttggcaattgaatgaggctgattagaaatattttcagcaaaaccaagagatgttaaaatagttaaagcagttaaacctttaaccattacattttcattcatattttacctccttccaaatttatttttatagttaatgtatctagatacacatttactatatacattttaaataaaaatattaattaaatattaattaaccacttattaacgttttattaaattattttacattaattgactcatttatttaaatatgcttaaaactcaatatcacgcaattaaaattgactttttaggattattttggtcttaaatattaattattgaattaaaattgtaatatttattcggaaattaggtgattgaaaatatatggcggaatggtgaacaattcatgtatttataatctttcactttactatgtattgtgtttaacaacattattagcgattagttcccctattatttatgacaatatgcagtcaatcaatgaaacatgtatgtatgagtatatttggaactagtaatgtattgttaaatattgaagatgattgaattatggaatttttttcgagatatgttatttcggggatcagattttgcgattttgccttggatagagtagttgcgatttgtaaatacgtttttcaggttcgattcaatttcgttgttaagataatatggattagtttcactgacatgttgatgcatgtcttttttgttctgataaagtataaaatgtttacttaacattacttagtatgacacctgctaattcaaacattatttgagacattcttttcaaattaattataaatttttacctatagactagtttgatatttatctacatctcaaaattctcatcaacaatctttcacatccaacatttttactttagtttttataattcaaaacaacaaaactatgttaaaaaattattctattttttagttaatagatagttaatacatttttgatatttagttaattgttcttttaaaaaattattattatattttcattgtaaacgtttacaatataaaaaaaggagcaataaaaatgaatacaaaatttttaggtaaaacattagtagcaagtgctttagtattaacaacattaggaacaggcttacattcttcatacttaggattagatacaaataaagttgttaaaacggctaaagcagaagaaaaaatgacagatggtcaattatggaaaaaagttagagattcattacatgattctgatattattttaagtaacgagtacgaaacaatcaacgttacttatttattaagcaatggatattctagcagcgtttctgctcctggaaatgatgatggaggccatctaacacaatctatagactttaaaggattaaaacaaattgatttaactaaggaaaatgtctacgatgactttaacaaaaagctagatgctaaaaatacatggaattctctaaccgagaagttaaaaggtcttggtttactacaaaatggccaaaaagtatctatttattcttcagatagctcttctccagtctcgggtaaagtgggagaaggagtaactagtggtggcgaaaatactctaactaaacgcttcatcaacaaaatcacaattgattaaaccttaaactcaaatttccttaattcataaaacattaataactaaccctttcttacaaaccacctagcccataatatattaaaacgtcatttttatttcaattagcggaaaataaaaaaaccattccgcattaactttggcaagttggaatggttaaaaaaatattttagaagccagcgtttggcttgcttagacgacatgttcgcgcatgtcgtcttatttttacatttatataataacacgcaattcaataaaatgtctaatcaataaacctcaattacattcaaattcaaaaacttttcacctaatattcatcgcttaaataaacattacgtttaattaaacagacattgtcaatcgcgtctaatacccctgctgtccgaaaacaaaattattttgtattcatatttaactgttctctttcctcccttttcaacgcaactaaatttcttttaccgttagagccccaatctttaatctttaattgttctaccgctccatttattaaatcctttaaagagtaaaactgctaatagcaacgtgataataatatagattgccaatgttaatgtaactggtatactcccttcgataaacatataaacgtaacgtgtagcatatgtgattggtaaatagaaccacgaatgatctccaagcacttctaatccaaaataaacgttaaaaataaacattaaaactccgacaacaatagccattacatctttaatgaaaatactaaaaataaaaagtagcagtaatataattacattgaaaaacaatgatacgcctataaacataagtgttattttcatatcatgtgaatgccacaataaattaattgatgctaatagaatacatatggctgtaatagtataagtaaaaatcattgatgcatttaaccaatttagcctattagcttttcctaaaatatgattaaagtgaccaatattttcttcaaaattgataacttgatagacgtttatagaaattaatagcgatgtaattgcattaaaactcgctgtaaacaaacttatttgtcgaccattccataaatttacgtttaaataccaatttataaataatataaacaatatggttacaataatgggtacaaatgtgagcgcttgcttagaaaatttcaacttacatgactttaattcgttaattatcattttaatcgccaacttttcttattatttaaaaatgttactatcgcgaaaataatgatgctaacaataatcgaaatatataaggcattgagatcattaaagtattttgaattatggtttacaactaaaccattaggtagtataccaagcgtaataagcgggattctctgcattatcccccacggcaacacccaaaataaactcttcaatgttaaaaacaagacacaaatgactgataatactaagtttattaatattgatacgaacacaccaaagtatcgagttaataaaaagttgagcggtatcaatggtagagatactacatacatcaacaatattgtcaccaataacaacatagcattaaccggatgtggattaataattaggtcacctatataagcaataataaatactaaaaagcaatgtaccaaaaatgctattgataaaatgaaaatctttgctcttatttcttttgtaatcgaccaattattacttaagtaataattaaatgatttatttctcatttcaattttaaataacgaattacaagccatacataatacaatcgggatgaaagcaattggccaaatattaaatagtaaagttatatatggtgacacactattcgctgttcccgtattacttttggcgaataagactgtgaaaatagcaaaacaaagaaataccagcggacttattaataaaacatacatactgaaagaatttttaaatttgataccttctatctttaaatgtatcatttgtaatcacctttcgttattttgaagaatatctcttctaagttttcatctttgttatttctttgctgatattttagctcaccctcatgaataataccgatatgatctgctaaaacttggatttcagataaaatgtgacttgaaataataatactagtaccttgttctgttaataattttagaagttctctaagttcttggattccatatgggtctaaaccattagatggttcgtctaatactaaaatttctggctttttaattaatgccattgcaattccaagtctttgtttcatacctaaagaaaagtccttaacctttttctttttatcgacatttaaattgactaagcttaaaacactattaatttcgctgaaatcaacgctttcatttaaacacacaattttcaaattatcttgtgcacttaaatgattatatgtcgcaggtgtttcaataagcgaaccaactttgtgcaaatcatttcgtgtcattggtctattatctaatttaatttcccctgaatcttgttgaagtatgccacatataattttcataagtgtcgttttaccggctccattaataccaagtaatccataaacttcgttattttctaaagtgatattaatatgctttaatacatcttgatttttaaaccgtttcgaaatgttttcagtaactaattttgccataatcaaaaactcctttgatttattaacttgctttttgatttgctacatttaatgctttatacacatcaagctcaccatgcccatatctactaaatggtttattattcttagatgtcccatgctgatataacaattcaatcgctttatctggatgtttttcaagatgatatttatcaatgattaaagctagtgctcccgaaactttaggtgtggctaatgaagttccagcttgataaatatatcttccgttattggcagtagttaaaatgttctccttatgcatatacccttcattcatccatttatccacaccgaattgatttaaataagcaaatgatcctccgggcgcagcaatatctgtataattcataccaaaattggaaaactcagatagattactcttttgatctgtagatcctactgtaacgacattgtccatagatgcaggaacatctttcacttcgccattaccttgatattcacgctgtaattttagtttctgtttgtcattgacatcaataccatcattaccagctgcagcaacaacgatagattttttcttcttggcgtaattgattgctttctgtaacgcatcgtattctactttttcatcttttctaaatgtttgatggtcatttttgtccaaaataatataactaccaacactaatattaatgacttgatttccatcatttgcagcttgaacaatcgcttttgatacccaaagcagttctgtttttttactaccaaacacgcgatacattgtaaatttgttattcggtgcaacacctattaacttaccattagcactcgtttgacccgacaccatcgtgccatgtcctttcctatcattgacatcgtgaacatcacctgtttcctccggttcagtacctctaaaaccgtttaaaggtactaaatttttagaatcagtcgagaaattatttttcaaatcgtcatggtttttcatcacacctgtatctatgattgctattttggtgttagcatgttttggcaaatcatcatacgatgcaccattattggttattttattcatatcccattgtcttgaaaataatgactcatttgatgttctgtctattgttttctcgctagtaatacaagttgaacatgtggcattgatatatttaatatcatttttatagtttgctaaagcattagcatgcattttcgtcattttaatctgtgccacatgtaattccggtatattatagacaacgtttaaggacttctttttaactaacttgttaaatgttgctgtatttttgtattcaacactgtaatatagttcttctgacgctgatgcattactcattgtaatagatattaaaagactcaatattattaaactaataatagcgcgctttatgattttcatattctaatctcaaatgaattccagaactttatatggttcaggtgcgacaacattctttttaaatgtttttgacgctaattcataactttctgaaatatttgctggatatattgatacaccataatcttttaataatcgaatattattttgagtaactggattttcccacattcgtaaattcatatttggaaatatagaaagtttttcaaaagctgtatgacaaatagttaataataaattgtcacatataccatttgcaattttattaatcgtattagaagtcgcaggtaaaataataatcttgtcatgtttatttgctatatctacatgatttaaaaaagggtcttcaaattcgtcataatagttatcgcaaaattgctttaatatttcaccattaataaactttctaccgtttgttgacgcgattacatttacttcatcaaattttgattttaattcaataatatagtggctaatattgatactattaactgagccacacaaacaaatcaatacattttctcccatgatatacgcctccattcagctaattaaaaacgcattggtccaatttttttcattgagaatttttgtatttttcagtgtcatcaatgttagatagacccctaattcaccttctaaaaggccaactttcctacttttaaatacatcttgcttattttcattaatgtctataaaattcaccagataatcttccttataatgagaaatcagtttatttattaatacagtgatataatcagacacttcatttaattcaaaattcaaattcataattgttaacattaatatttgtgatgacaatccatgacaaatagttggacttattaaattttcatctttatcatttactacttgtagcatcacttttttagacattttaattatttcatcatcttgtaatgcttggccgattaaaaacaacgtcgtcattacacccgtattgccataacaccaaccattccgaataaaattgaaatgattacgttcagaaattaaatcgtaacgctgcaaccatctttcgtggttacaaaatttttcgtccatgataaatttgtacatgtcttttaatatgtgctgatgattttcaatcgtaattcctttaatcacgcataatgcaaataaagacatcggtcctagcactccatgtgcaaggccaagattgatattaccttcagtaaaataatttttatcagactctaaaaattgactttcttgtgggactacccagctatttttagaatattgaatatctttaaagtatactaatatgctttttaatgctttaacattaaattcattctcatctactctatttagcaaatatctccctatcccagctaatccactgacagtatcataatttaatggatttaatggttcttgtaatatttgatcaaatttattttctatttcatttacaatgtgaccatcaatattatttaaaatattttgataatttttgccattttgcgatgctaaatccattgaaaatgcaatacctgaaagtccaccaaacaaagaattgttatattgaccactctgtaaatatggtgctaatttcatgatgtacttatgcacaatttgctcagtattaatatcgaaaactttttgataagcatctaaaaacaaaatgatacctggtataccatgtgataaagttgaaggttcaaaataatcggtttcagtagatgcttttgaaatgaaatcatctacttctgaaatctcttgaaacttcttcttcaatattagattcatatcaatcatttttgtcaccacaccaatgcttttgagttttaacaatttcttttacaatagataaaacaaatgtttcttgatccttatcaatgccaaatattcgattgcagcgcatatgaattaagctgccaataatccttgaccttttagtagttaaagtttttttaagcccttcatttaatttgctcaaaatttggttgccatcttttaaaattcgataaataccactatagtgtttagccatatattcaaaattattagcaggattacatatagttacaagttcatttttaaaaggtctaatatctttacttttaaatgatgtaggtacatagttattaacaatttccatacgctcttcattagaaattgaaaacatctcaaataaatacattattgaaatagcaacaatatatggtcgatcaaacttaaaatcattttcaataatattgacagctaaattcgtgtcatattcaaagaaggcttctatttcattaatcgtgttctttccaccatatctaaaaaattctggctcgtatgatacaaattcataatctgaaacttctgtcgtttgtcgaacatgtggtaaccaattcttcaagatgctgtatatttctgcgtaattttcgtcattcctgaataacctcaactttaaaatgtcaccttgtttgatataacgcattaaaaaatatttttctatatctcccttatctttaagatgttttacaaatggatacaaattgtcgatgataaatgtatcttgcgatggcttatcgatatgaatatgtaatgcaaaccagtctttgtcatattcaatatctgtatttttatattttggaatttcgatttcgggtcctcgataagatgattttttataaattggtgtaacaatttcatacacatgatcattctttgattgaggtaaaaatgattctactaaacgtacacgtttatgcttcttatattctttcatcaataaatatctatgattagctaatgataaatttagtagaagcttgttatctccataaactaaattcacgatattaggtatattgaattgttcttgatatttcaaaaattgttgatcccattcttcatttttaggtaaaggtaataccatctcgttaattttccaatatgctggtttaagaatgacatttttatatctgattcgtggtgaataactaaatgaatcaatactcacatcattcatagattcaatgcatttcacagattccattgaaatttctcgtaacaatcgatataaattacattcttttaaaaagttatacatattgtttgattcaaatagtacccttttatttagttggctagaatataaatataatttgttaaaggtagcaccaacataaatatcatctaaggtaagctcatactttgaataactattactacttcctaaattcaatgaatattcgtatgagtcatgattagttaatacattatgatttctcggatatttcggtatgttatttatagaaatcatttctacattgtcatcacatatcatcttctgataataatgtcctttttcatgttctaattttgctaaagtttcagtatcaattaaatgatgaaatcgcccaaatgtagcgccagcattaaaagacgccgttaaaggactaataacaatgagctcattgtactgattgtaaaaacgtcctaaataaagttcagcataaacatctgcactcattggcgcatgataatgattgatttcattatcgttaatcaatgactctacatctttttcatttatgactatctcatcgttatttctcaaggcatgtaaaaatttttgcttaagcattacaatattatttccatcggtttcttcttcttgaaaaattgttgtcccgaaacctgttatatctgaaatcaaatctttaatattcacgagttgttcaaatccatacttttcaataaaacggttgtgaagaactttcaaatctgtgaatccaatattatttcttgataaaagccacaataagtacgctgcttcagatatatttgttgctatatcttgatgtaaataattgttaatcatgtcaattttggtatcaatttgaagatagtttttacatttgaatagtgccttcatatgatgaataatgtctttatataattcctcgccaaatccaatttcagttttttcataagctaatatcaatttctggatttctctaatttttttcacaaaatcatcattatgtaaagaaagtttatttaaaatataatttaaattatcgctatatgataacggtggtctgattgttgaatatataatttcctttgagacaagattatggatatatactttcactttagtaatatcattaatttcaaattcttgatttatcttttcagctaaatttgaaaaagtaatattattattcgtcacagtggttttgatgaatacgagtaattcgctatttttaatggaaaaagatgtatctttattgttgtttaaataaatagcactttgttcatttaaatatattcgatcattgataatatgtgctttactattccaaataactttcaaattttgataatattcatcaatactctcaatataactaaccagtttatacaaccattcgccatcgactttcacatatttttgaatactatttccaactttaagacgtgttggttcatttacaaaatgccccaaattaataccacttaataatccaaatggagttggacgtgttgacattctaattaaatattttaataaactttctttagcatctctaaccttcttgttatcgccatcaaaatttatttcttgtaaagtacaatataagttaaatgttgttgttaggattgattctttcatctgagcatttaattgtaagtcgctatatttaatttgttcagtatttaaaaataaattgaaaaattcaactgataataaaggtgttctaatcatacaaatacttgacggttcgtaaatagtgttcatttgtaagcacctcacatatttgaatagacaaatagagccctttcaggctctatttgctgtaatcttaacagcagaagctattaaaactaccagtcttagcacaaccaggagtacataaactatgacttgtaatacgttcgtcacctgctgaatcatttgagttattgtttgctttaacttgcacgtctaaatcaagaactttttccatagataaaacctcctattattagttgaagttaaggcctacttcaattgtcatattatcccttttcacacaacaaatcaataaattatataattatattttgtgaattttttgtaaacacttattaatttagtaatactattttgataattagatttttgtgtttttttattactatttattttcactaataattttgcatctaagttcataattttaaatttattgatgaattttttaatagattaatcaattcatttatacaaatacttagatatttttatctatcaatactattacgaatttggagatggctgcttgagattaattaatagatatttatgcagttttgttctatttatacaaaatttagcaaataataattgaagttattttaaagatgaggatataaacatataatttcaatgacttgattattttcttaaatgacatgttctaagagggtcaatataataaccaaagcttgtcattacttatatgtaaagatagaggctaattacataatcctaacttatttaacaggaagtcatgaaaactatattacaactaaaagtataactttccatcaccaaagtcagaatttattgaaacactcaactgataatatagaaggctaattataaaaatacctggcgattaataaactgtttccgttttttagcacttaatatatttaaaaagacaaatagagccctttcaggctctatttgctgtatccttaacaacagaagctgttaaaactacccgtcttttcacaaccaaagctacaaaaaagatggctagttattctttcgtcacccgctgaatcattagtgttgttatttcctttaacttgcacgtctaaatcaagaactttttccaaagataaaaccccctatttaaaagttgaagttaagacccacttcaattgtcatattaatcattaccacacaataaatcaatgaatttaataataattatttgttattaatttgtaaatcgtcattaattttatggtactattgttagtttaaacaaataatgtaacttctttttttaatatgttgtgaatattttttgtttaactcttaaatttcgggtttaacttcctctatttctaacagttatactccaggattagtttctttagaatccgtaccgattaatttaacagtatggttttgccagtcaacttcataagtagatgtaaacgttactgtattttgatttttgtagttattaccaacccagtgtagtcgattccattgattagtatatctatccatttctctttggtaagttactttgattttagatttttttgtatcattttgtttatgagaaagtacgcttataaattctgggttaaagttaccacgcgccaataaaggcatttgatgtgttggcaagaaattttgaccagcatttgaactactttgtctaccacctaaaaacagttcattaccatatgttgggtcataactatctctaccatatggtccccaaccattattcataattttgtgcgcctcaacaccccagccaattgatttatgatttgtttttctatcaatcgtagttctgtaactttcttgtttataatttatcgtttctgaaaatgattttgatccatttaatccacctgataagccattagatatattaatatctccgccataagaataacctaatgtttgttgaacttggaattcttcattttgatttttaggtgcatagtcaacaacatttacagcatcatttgattctgaactaaccgaaacattatacttaccgccccaataaaactgtgagtaattgtaatcttttggattaggctttttataacctgaattaatgtttccggctgccttaagtactaacgtatctttgtcataacttttatccttaatgaaattaaacgttaaaatttgagaaatattcaatttatcattatcagatgttgctgttgttttgtataaagtgattttgtcatctacttttttctcgcttacaggtgtgatatgttgagctgcatcaactgtattcgatagcaaaagcagtgcaattgatgaagcaactgatgatttgactaattttttcattttcatattaattatgtcctttcactttaatttcgtgtgttttccaattaacttcatatctaactacaaagtttctatttacaaatgcattatgctttctttctgcgtaaataccagttctagggaataaagtcgcatatgtaatatctaagtttctaccatatgaaatttcaaattcactcgtatcacttgaacctttttcatgtgatagtgtagtgataaacgatggattaaagccactttgaactaaaggtggcaattgattatcaggagcaaaatattctcttgctgaacctgttggaccatttggactttgtacgaataaatatctatcatgcgcagatttttttccatcaggcgtaacaaattcgtttgctttaacaccccatttaacagattttgagttttgcttgtctacttcactgacataactcttttgggtataactaattgttttagaataattaaatgagccattgccacctatagatggtgctgactggaaattacctccaatgttatatcctaatgtttgaccaacatcagtagtttctattttgtttttaggaaggtaattgattaagctaacatttggatctttagtcgtcagtcctatattatattggaatggccaaatcattcgtttagttaattcatatccactacccttcacatctgaaaatgaagttctggaattaataaaaccttgcattttaacaattaaagcgtctttgttatattttttatcttttacaaagtcgaattggacattttgagtaacgccccatttcttactacttacatcctccgtacgtttgattacttcagcaccatcaccaatattttcaatattagtatttgctctagattcttgaatcggagatgctaaaggtgcaatcagtcctactgacaaagttgcagctaacatttttttcttaaacataagcttcactttctttctatataaatttttaatacaaatttattctagattatttcacttatttataaaattaactgttcattaaaaaataaaatgctataaaatattaaaaatgacacaatttattcatttatgctgctgaaaaccggtcattttgatgcaaccttcattacatttaaatagttccctttatactcgaacaatatgataaaattaccgatactcaactttttcgctataaaaatcaaaacgaactttaatcaaatcttaaaaaataatgtttgtattatcacaaataatctataattgaatttaaaattaactgattattaactattatccgttaaatggagaggattacttcgtatactgttataactgaaatcttctatatatcatttcgtaatatcgctagcttcatctaaaaaatttaatgctatgatttagccgaattaaaaacatatatacttatttactatgaactaaaagtttatcctaaaaataaaaaaccatgatttcgaagtcttcataaactgaagcttctactctcatggcaatttatactatgatattcaattataatgcctagtctcatagtaaacggctactacattcgcatgtacttcgttttactgtccacgcatggtcgttgacttatttatattataatataaatattttatttttcaatacttaattttaaaaatcccctatgaaaatggagatgagctgcatctttaaaccttattatacattgtataaaattatattgcgagatgctaaattgataatatacacttttggttgtgtatacatctcacctatctttttttgcttttttcaaataagaaagtattaaaaattaatgcctatacaatgttaaaggaggaacagacatggctaaacttgatttaaatagtcttaacgacgagcacgtaaaattattaataaatgaattaaaatatccagaaactcatatcgatgtaaatgaattaaaaacaatagttgctagtcgaataaatgaaaggcaagaaataataagttttaagttaggaataaagtacttattaacgataaaaagagggaacatagaaaaagataggttttcaatttcaatcattttcaaagatacctatcacaccctagttagaatagatattaacggtggtactcacgataatccagatggaacaatcgctccgaaaagtcatattcacatatataatgataagtatgataaaaaggataggtttgcttatgaaattaacttgaaagatttccccgacatctataacttgtataatgtgtatatgtcgtttttagagtataataatataaaagaccttgaataaaggagggataatatgactacatttgatgctaaaaaattaaaaaaagaatatcttgattggtataatcagaccttagagttttctaatttatcaaacaatgtagtaagaatagatactccttttaaagataattctttagataatttaataatttacgctttatacgatcagtccagagacatgattacactgacagatgacggctatactatatttgatttagaaaataatggtatttctttaaataaatcaaaaaaacgtaaaaagatttttgaagagcacctttcagcttacggtattaaatataacgataaaactcacgaaatttttgttcaaactaactttaaaaattttaataaatcgaaacataatttattacagtgccttatatttgttaatgatatgtacttactttctaatcctaagtcacagaacatatttacagaagatgttgcaaacaaattggatgaacataacatttattacggaagagacttacctattataggaagcagtggtgttgttcataatttcgacttttttattagcgctaagaaaaatcaaaaagaaaaatttatcaatgctatttctaaccctaataattctatgattattaagtcgaaaataacggatgctatgcaagcaaaaaaaataaaaagacacaggcaaaatgagtttatttttattttaaatgactcaaaaaaagaaataaatgaacataataaaaatcttcttcatgaaaactatattagtacaatagattatagcgaattagatgaaaagataggtttattgatttaatatttatagacgtgataatatcaatgtttatattaaatgaaacgaatttgaaaaattcgaaacagcttaagatagcaaattgaatggccttattgataatgcagaatcgtctgcacttagttgaacaaattctatgagaatagatattgttaaactatgtggataggtgattttattttgacaagagtcagaagaacatatattaaggatttcaaattacaaatggttaaactttatgaaaatggtataacaagaatcgaaattatacgcgaatacgatttaacactctcaatcttctcgaactgaataaatactgggtcattcaatcatcaagacaacttattaagtgatgataaatgttcataccattttgcaaatataaccagatactctcaacaaaatgtagagttcaaaattaaaaatgtccctaattggcacattgctgtatgatattaaattcaacttagatttcaacaatataactaatgaagcttatatttaccgcgatatcaaaccaaacagcctatccacaaacaaattagaatataccatgttagtaatagtaaatgatatatatcttccaaagaccgcaaactgtagcagaaaatgagaaccttgcgtttttgaaatggtctaataaatcaaatatcattgaaactttaatcacataaattaacagtagtcccctgttcgcagttctataaattacaaatgcaataaaggctaaagtaaactaattactttagcctttattaataatttagtcgaatttattaaaaatcgactaactcctggttatgctacgcttttctttaaaatccgcacgtagatgccgattgattatattataatattattattttattttttcaagcgtatatataatgtttgattttctttaagtaacagctaaacattacatttcaaaacgattaggtcatgcagatgtacatacaacgcttaaaacatattcgcatttgattaaagaatttgaagataatgaaactaaatttatagaaaaaaatctgaatgatttgttttgtgactaaacttcaaaatcttgtgactaaagttaagattaatcatcaaaaattagtcacattgtggctaaaaaattttaaatggatataaataaataagaagtgtaaaaatgaggataatagctcaaatgcagatatatcaagggtttgagtctaaaataaaaatagcgcttaaaatgggtaaaaccaatttaagcgcctttacggaaggtaagggattcgaacccttgagacgcttgtgacgcctacacactttccaggcgtgctccttcggccagctcggacaaccttcctcaacaataaatatgtaataaaaaaacagaagcgatatttcacttctgtttgtatgactcctacgggactcgaacccgtgttaccgccgtgaaagggcggtgtcttaaccgcttgaccaaggagccatggctccacaggtaggactcgaacctacgaccgatcggttaacagccgatagctctaccactgagctactgtggaataatagaaaataatggagcgggtgatgggaatcgaacccacaacatcagcttggaaggctgaggttttgccattaaactacacccgctaatgtaaacgattatggggcggctgaaggggatcgaaccctcgaatgtcggaaccacaatccgatgtgttaaccacttcaccacaaccgccatgaattaagaatggttcaggacagagtcgaactgccgacacatggagcttcaatccattgctctaccaactgagctactgaaccttaatggtaataataatggcggtctcgacgggaatcgaacccgcgatctcctgcgtgacaggcaggcgtgttaaccgctacactacgagacctattaaattaaaaactatgtattgcgggaggcggatttgaaccaccgaccttcgggttatgagcccgacgagctaccgaactgctccatcccgcgctaatattattttgaattacctaattaatatatcataatcaaaaacctaaagtcaagaactttttgaatttaatttaaatgttatctcttaaataattacttaaatatcgtagcaacatgttctctgttgaacacaaatattagtatattcatttttgtagtatacgtcaacgacatttttaaagttttttgtgtaaaaaaacgcttcttattcccttttatcatataagtgtctaatagttgtcataaatagtgttaaagcatttaaaaaggtataggagttataaagtttacaacgcctataccttctgaaaaagaaattataaaagcttgttacaccgcatattctttcagtcagcgactaccaatataacattgtagccctaagacattgcttgacgcctcaattaccacaattttttcaaaatcagcagctacctactgacacaacatagcaaccaaacattacctatcgtgtcatgtaatcttgcatccgatcttgcaacgctgtaaatgtttcgaagccatcctcttctaagaagtgccctccatcttccacgattcgcaagttcccctctaatgcattcattaaacgctgggtttctttatatgaaacgtatttgtcatttttagaactcaatccgtaaaaattgtcaactttctttttaatattatcgtaatcaatggttacattacttaaatcaatatctaaatctatattttctgcatcttctttaaagcccgctatactaaaaaagccttcaatcggctgatcaatcatttcaatatattttaaagctgtgattgaacctaaaccatgtgttacaaaatatgtatcctttttgcgtacattaatttgtttcgtcatagcttcaatccactgatccactgtcttcgcttcaggggattcaaaattaaataatgttacgtcatatccttctaaagttaagttatgctccaaccactgataccaatgatttctactatttccatgcatagaatgtacaataattacatctgtcatctcattctctcctttcaacttactacttcttttctatttttaaaaaaatgactgattacctataattgtaaaataaaaacaccttaattagaaatgttatatcgcaaagtgacatttctaattaaagtgtattgtcatcatttcaatatcattcaaaaacagctaaacctttgtctctgcttcaaattcacaaaaataattcccgttgaaagtatctatatttacacattacttccaccattatataacttaaaaatgactatatttcatcaaacattatctaaaggcgtcgcacctacaccacaccatccaacaattaacttacaactctgcgattacttcttcagcagcaactttaccttgcgtaatacaatcaggtagtccaaccgcttcaaaagatgcaccagttactctaagtcgtggatatgtttgtttaatatgtgcttgaatctgtctaatttgttgaatgtgaccaacatggtactgtggcatacttttcggcaaacgattgacaattgtaaattcaggatcgcctttaaatgtcatcatttgacttaaatctctacgtacaatcgatactaattcattatctgtatgatcatcaaccacagtatcacctggtttacctacatacgcacgaatcaaaaccttaccttctggtgtagtaaatggccattttttcgatgtccaagtacatgcggtaatgtctgtatcactcgttctcgcaatcacgaagccagtaccatcataagtattttcaatatctttttcatcaaatgccaatacaacagttgcaacagtcgtactatccatcgttttaaagtaatcaaatgctggatcttgtccgaaccaattcaaaaagacttgatgcggtgttgtcactaataccccatcgaatacatcttcttgttgattactgtaaacaattttatattgcttttgagatgtaataatatcatccactgacgtattgtagcgtattgtcacacctttatttttcacatcttgttctaatgcttcaataaatgaacttaaaccatgcttaaattgtttgaattgtccttttggtgcgccaggatataattgtctttgtttcagacgcttatttttctcatccttcataccttttatcagacttccgaatgcctcttctttttctttaaaattaggaaacgtactcatcaaacttaatttatcaatatcggtaccataaataccacccattaaaggctctattaaattctcaagtacctcattacctaatcttgctctgaaaaatgcaccaacagaaatgtcaccatcttgcatttgtataggctttttgattaaatctaatcctgctcttaatttaccaagtggtgaaattaatttagttgtcacaaacggtttgatatctgtcggaattcccataattgatccacctggaataggatacaatttgtttttcgcaaaaatatatgattgtccagtcgtatttgtaacaatatcttgttctaatccaatatctttcgctaattctgtcataatcgtttttctacctaaataagattcaggccctagttcaatcatataaccatctttacgatacgattgaatctttccccccggacgattcgatgcttcaaagatggttacatcaatattaggatcttgctgttttaaaaaatatgcacttgataaacctgttatccccgctcctataatagccactgatttagtcacaacgtttcacgcttctttcgtcattaaaatatagacttgatttcatcaacaattgcaccgataaataatggatgtgtattcggcatttttggacgataataattcgcaccaatatcatcgcaaactactttacattcataatcattgtcataaagcacctctaaatgctcacatacaaaacctactggcgtatatataaagtttttatactgatgtttttcatataaatcacgtgttaaatcttgtacatctggccctaaccaaggtgtacctgtattaccttcagattgccaaccaatcgcgatatgttcaatattagattgttctttaattaaaagcgcagtatgttctagttcttgtggatatggatcattattcttttcgattaaaccttttggcaaactatgtgccgaaacaactaataccgtgtctttatgttcctcttccggtatttgagctaatgtttcgttgactttattcgtccaatattcaataaatttaggttgttcataataatgtttcacatgtgtaagttgaataccatattttgcagcttcttcatcagcacgtttgtcatatgatcctactgaaaatgaagaataatgtggtgctagtactaccgtgattgcttcagtaatgccatcattgtgcatttgttcaaccgcatcttcgataaatggtgaaatgtgttttaatcctaagtatagtttaaattcaacatctgcatatgctttatttaatgctgaaactagcgcatcagcctggtcatctgttgtacctgctaatggtgataaaccacctataaattcatatctatctttcaaatcttgaagttcttcttcagatggacgtttaccatgtctaatatctgtataatatggctctatgtcactttctttataaggtgtgccataagccataactaataatcccatttttttagtcattgataataccttcctttaaatgaattatctttcatgtgcttcaatgtaaaactatgattatctttgtgtatatgtgtgtacgaattcgcttactttacgtaacgtctctggttgcacttctgggaatacaccgtgtcctaaattaaagatgtgtttaccgttctccataccttgatctaatattggtttcaatctctcttcaatgacattccatggtgctaataaaattgatggatctaaattcccttgtaatgttttagtaacgcctaattgttgagcctgattaatagacgttctccaatctaggcctaatacatcaatcggtaaatcattccattcattgattaaatgactggcacctacaccgaataaaattaccggcacatcatgtttttctttaacctcactgattaatcgaatcatatgtggtttaatgtaacgtctgtaatcctcgacatttaatgcacctacccatgaatcgaaaatttgaatcaattcggcacctgcttcgacttgagctgttacatatttaacagatacatcaactaaatgattcattaaagcaaaccatgttgcttcatctctatacatcatcgcttttgtaaaattgtaatttttcgatggtccgccttcaatcatatatgacgctaatgtaaatggtgccccagtaaatcctattagcggcacatttaacttttcttctgttaaaagtttaattgtatctaatacatatggtacatctcgttcggggtctatttgagaaagtttctcaacatcttgaattgttttgattggattatgaatcactggaccaatacccgatttaatttctacatcgacaccaattggctttaatggtgtcataatatctttgtataaaattgctgcatctgtatgataattatcaactggtaaatgtgttacataagcgcacaactccggctgatgtgtaatatcgaatagtgaatatttttctttcaattttcgatattctggttgcgaacggccagcttgtcgcataaaccaaacaggtgtatgtgatgtttcttcacctttgatcatttttaaaattgtattgtttttattatgcaccataaaggcctcctaaattaaaatcattcttatctatattatcatatcgctcattcgttcgtattttcaataaataaatgtcataaaactgacatttaatcatagaactatttattgtaaatttaaattctaaagtccattattttgtatcattacttctaaatatctcgcaagattcattatagtaattttaatcaattattaatagtggtaatgactagtttatcatcgtataataaataaaaacataagggggacctttcatatgaagaaactatatacatcttatggcacttatggatttttacatcagataaaaatcaataacccgacccatcaactattccaattttcagcatcagatacttcagttatttttgaagaaactgatggtgagactgttttaaaatcacctacaaaatatgatgttatcaaagaaattggtgaattcagtgaacatcatttctattgtgcaatcttcattccatcaacagaagatcatgcatatcaacttgaaaagaaactgattagtgtagacgataatttcagaaactttggtggctttaaaagctatcgtttgttaagacctgctaaaggtacaacatacaaaatttattttggatttgctgatcgacatgcatacgaagactttaagcaatctgatgcctttaatgaccatttttcaaaagacgcattaagtcattactttggttcaagcggacaacattcaagttattttgaaagatatctatacccaataaaagaatagattcgaagaaaacttccattggttatgctgttaacgtatagatgctaatgtaatctgaacgccgtatcatttggcgttcaacattacatgcacctttacaacatacatgccaatggaagttttttagtctcgtaataatgtttcctgatatttcaactttttaataatacttctaatcgttaataaacctacaatatagaaaatgagtacaacatagaataacgtcatatgttttataataaatgtcactgcaaacacagtacaaataacaaacattaatctatataaaaactgttcataccctttgattaccttctcttcaggtacaggccacacttgaggccataagccatatgcttgctgtgaataaaattgtgccatttgtaacaatataatatatacaaataaacacccaataattgctgtcactaatggatatgataaccaaaccattaataaaactgcaataattactaacctaaagataatattaaatgcgtctctccctcttataaagcttctaataaataagaataaatacatcgcattagagttaaatttactaccctttggaactggtaaaagtatatctagataacttcttctgactgcagattctttcaaatgttttacatcggtgaacatattaacaaatttataataattcatatgatgtcgatgttcgattgcaatcattttctcccaaggatacaaaaagcctggtttatattttttaactaaaaattctattaacacaggcaaagcaaccatcacaaatgcgatgtaccattttggagctaatagtaagtaatatgttagagcaaaggtgatgaatgatattaaattaacttgccatgttttaagtcccgattgataccattgccatcttaagcgtaaaccaacatatggaaaaattaatgcactgactccaaaacaaatataaaatgccacattatgttgattaatattgtaaaacaacgggaacattacaataacaataatgagttggattaatatgcgcgcaaagtaactatataaaatcgcatgacgcataaattgagacatgtgtttttcaaatggtaataaaaagattttatccgcttcttttaggagtggtcgcattggaaaaatggatgtcaatgctacaatcactgctgctattaatgaaaaattgatattcgttggaatatgttttaaccattcaccatatccaaaaataaatgcacccagcaaaataagtaaaaagaccatgaaatgaccattaaatataaacttattataataatttttctctttacgaagggcatgtaatcttttattaaataatgtggtcgcttggttatgcatgtacatctccaccttgcgtcacatgaatatatatatcgtctaatgtttgtttatgtaagccagtttgttgtctcaatgcttctaaatctccaaatgcaacgacttcaccttcgtctagtatgataaaacgatcacaataacgttcagctgttgctaaaatatgtgtactcattagaacggttctaccttcgtttttcttttcaaccattaaatctaacatggattgaattcctaatggatctaggccaaggaatggttcgtctataatatacaattcgggattaacgataaacgcacaaataatcatgactttttgtttcatccccttagaaaaatgactcggaaaaactttcaattcattttctaaacggaatgtctttaataatggcattactcgattcatcgcttcatcacgatcaatatcatatgccattgctgtcatctcaatgtgttcctctaatgtgagttcttcataaataaccggtgattccggaatataagataactttcttctataagcctctatgtcatcattaatgttgatatctgaaattgatagagatccttccataggtgtaagcaatcctagcatatgtttaatcgttgtactcttaccagcgccattaaggccaataagtccaacgatttcgcctttgtttaattcaaaatttatatctttaattacagggcgttttccatatccacctgtaagctgttctactttaactgtcataaggcacctccatgacttatattgtaccaaaaattataaaatgctcatattaaatacacatgtcctaatatcgaatttttagcgacaatgttataatgaatggtaatacaagttgaaaaggagtgtagtcatcatgtcagaaacaattttcggcaaaattttaactggagaaattcctagctttaaagtatatgaagacgattatgtctatgcctttttagatatatcacaagttactaaaggacatacgttattaattcctaaaaaagcttctgctaatatctttgaaactgatgaagaaacaatgaaacatatcggtgcagcattacctaaagtagcaaatgctattaagcgtgcatttaatcctgatggtttaaacattattcaaaataatggtgagtttgcagatcaatctgtatttcatattcatttccacttaattcctcgatatgaaaatgatattgatggatttggttataagtgggaaacacatgaagacattttagataacgatgcaaaacaacaaattgctgaacaaattcaagcacaattttaaatgtatgcttaatctaagctcgaacgggtataatatgattaatattataacaattgcgtttgaagtgataacatcaaggttagcaattttaaacaaaatgagttatcaagataacagatgttaaaagtgaggagaatataaatgaaagcatcacgcattctattcggtatcggtgttggcgtagcagctggttttgtagttgcacttcaaggacgagacgacaaaagtgtcaagaacaacacgatcgatcgtactgcccctactggttcaaaatcagaactacaacgtgaatttgaaacgattaaacaaagttttaatgacattttaaactatggtgttcaaattaaaaacgaaagtgcggaatttggtagttcaattggtggtgaaattaagtcattacttggaaacttcaaatctgacattaatcctaatattgaacgtttacagtcacacatcgaaaatttacaaaatcgtggcgaggatattggaaacgaaatttctaagtagcacgttacgttctcgatcacaactattattattagtaacagcatatttattttttttaattaaatgccaaataaacgagatgacattagaaattagatatttcttgtcatctcttttttataactcaaatgaacttatgtttacaaattacaggaatacatcgtttgtagtgattttcgcttaaatcatatttatgaattgattgaaaacattgcttaggattcattgtgttatccttgcactttgattacgctttacttaaatcattatcgacaaacaacatacttatattttcattgagccgaaccttttatgcacattacatataccttacttgcacaaattattaatctggtatttattataattacatatcactatatttttagcatttgtataacttagttggtcaaaagatgcttttgcatatgccctgccatatccattttttatattattcaagttttcaaatactcatgtcacacgcgcctttttcataagtgatgctttattagcaagaagatgtgttcgcagaaatttgttctgcattctacttctacgctagtcaatcagccaattttaccaaactccactttcgcgtttcaaatcaaacaatacttcgcccctttcttcttatataacaattcttctaacatgatatgttactattgaattactgaacctgagttagttataatctaacttatattgaaaagagatgaggcgtaagatatgtttttatgtaaaagacaaattgatatcaatgcacgatttggtttgcctagaattgcatttatgagtgcagttgcaaccatcattatgtttttagttagttatgaagtaatgtattttttatctaatacgccattatcagatagacattttctcatctttttattacttgtatttatgacgtatccattacataaaagtatacatttgttatttttcttaccatatagaaaatcgtttaaagttcataagttgactaaaagaaaatggcttatattctataatacctacgtcaatcaacctgtacacaaattttatttttgcattaacttaatattgccgttaattatcttatctgcaatgttcgtttatctaacaattttattcccgcaatatggacattattttatgttcttattggcattgaatttcggtatttccattacagatttattatatttaaaaataattatattttctaattatggacaatatatagaagaacatagtacaggtattaatattttgaaaaaaattaaaaatccatatcatttataacaaaataattatagcaaggtgttattatttgtttttaggctatgtaatagcttacaatcaaatgtatatagaccttgtttttttattttcatcaatttctacccctaaacctaatgctctagtctgatgtcatgggttattgattggtgataatataaaactatgttatattcacgatgattaacttacaaaggagtttcaactatgaagatgataaacaaattaatcgttccggtaacagctagtgctttattattaggcgcttgtggcgctagtgccacagactctaaagaaaatacattaatttcttctaaagctggagacgtaacagttgcagatacaatgaaaaaaatcggtaaagatcaaattgcaaatgcatcatttactgaaatgttaaataaaattttagctgataaatataaaaataaagttaatgataagaagattgacgaacaaattgaaaaaatgcaaaagcaatacggcggtaaagataaatttgaaaaggcccttcaacagcaaggtttaacagccgataaatataaagaaaatttacgtactgctgcttatcataaagaattactatcagataaaattaaaatctctgattctgaaattaaagaagacagcaagaaagcttcacacattttaattaaagttaaatctaagaaaagcgacaaagaaggcttagacgataaagaagcgaaacaaaaagctgaagaaattcaaaaagaagtttcaaaagatccaagtaaatttggtgaaatcgctaaaaaagaatcaatggatactggttcagctaaaaaagatggcgaattaggttatgttcttaaaggacaaactgataaagattttgaaaaagcactatttaagcttaaagatggtgaagtatcagaggttgttaaatcaagctttggatatcatattattaaagctgataaaccaacagactttaacagtgaaaaacaaagcctgaaagaaaaattagtcgatcagaaagtacaaaaaaatccaaaattattaactgatgcatacaaagatctattaaaagaatacgatgttgactttaaagatcgtgatattaaatcagttgtcgaagataaaatcttaaaccctgaaaaacttaaacaaggtggcgcacaaggcggacaatccggcatgagccaataacacaaaaccgagcgaccgtggttcaaaaatcataccacggccgctcggttttttcgcattaaaaatcggacagatgagctcatgtttcagtatactcatctgtccgatatcttttaattcttaatcgagtgattcaggattgtagaatctacgattttcaagaccaaatattttatctgtaaactgacccttgtcagtttttttataagccttttcaaacatattcattctagcatcgatgttatcgatatagcataaaatttctgcttcttttaagtatggcagttttggcgaaccatactctaacttaccatgatgagataaaatcatatgtcttaacaacatgatttcttctccttcaatgttcaattcacgagctgcttcaactacttcatcactcgcaatcgagatgtgtcctaataagttaccttcgactgtatacgacgtcgcaacaggaccactcaattctctaactttaccaatatcatgcaaaataataccactatataacaaacttttgtttaacaatggataaatgtcacaaattgattttgcaacacgtaacatcgtcaatacatgatagcttaagccactcgcaaagttatgatgatgagaactagcagctggatatgtgtaaaatcgttcttgatattttttcaataaatgacgtgtgatacgttgtaaattagcattttcaatatctagcaaataatgagaaatctcttcttgtatttctgccggtgataaaggtgcaccatctacaaattgttctgtttttaattgatcttcagttgtcgctagtctaatttggttgactttcatctgtttatttccgcgatagtttatgatgtcacctttaacatgtacaatttcttcaggcttgattgttgccatatcattttttgtagccgtccaaaatttcgcttcaatttcaccacttttatcttgcaaatgtaatgtcatataatctttaccttgtgctgttacaccctgtgtagctttatgcactaagaaaaagtgatcaactgaatctccgggatttagattctctatatttctcatcgtttcccgccttcctctattttgtttaatgtaatcacttcttttgatggaacaatattatcttttacacatgtaaagtatagtacttgatagtgttctgataatgatcgtaaataattcaacattttttcagtacgttttttatcaaaatgaacaaatgcatcatcaacaattaatgggaacggataatatggtcttagtaccttaattaaactgatacgtaaagctacataaagtaattcttttgtagattgacttagttcaacaggatcatataattgaccattaacatgtttaaccgtaattgaatcttcattatagttaatcatcgtatatctgccatctgttaaatgcttcaatatttctaccgcttcattaataacttgaggcaaacgtttatctttaatttgtttaatgtgttcatcaactaaactttgtaaataacttaaacttgcccaatcttttgcgatatcattaagttgatttttaagactgtgatattcatgtcttaaattagcaagcgttgtatcagtttccatgtgattgatttgtgcacttaaatcactgacttgtgcttgcatttcaagatattgctcattatattcgtcaacttgagtagccaataaatgatcttcttcttcaagttgtgcagttgttttttcacttaaactagaacttaattcataagaatagttttggttctcaagatatttagttaaatcattaaaacgactcaaattactagtataagtttggtaatcttcatgatgttggtaaaaatcttcttcagtaccaacattgataaaatcgaatagtgctgtaatttctttattattttcttctaattgagcatttaaatgatttaattcatttgtaacaagtttggtattttcagcattaatacgccatttttcattcgtgtcttcagctgatttcaaccattgttgcacatcgtggaataaagataatttgttgaaataaacaaattgtgattttgtaacagcttcagcatgattgtagaatgtatctaattcttgaaccaattgctggcgttgttgatttaaatcactgatatgttgatctaatgctttaatattcgccattgtagaaatactatcaacaattaaatcatttgaaattttagatgataagtataattcatccttaacgttctcaactgtcgattgtaattcatcatgacgccctttcgcatcatttaaacgaccttcaatatactgacgtttctcttctaaaatatctttatttttcaaagcttgttgccagtgatcacgaatgcgatattgctcatcaagatcaaaatctaagtcataattttcatctaaaatggctagttgtgctttaatttcttcgatttcatctgtgatggcctcgctataatctacttcttttgatttagacatgatgataccgataacaaatactaaagttaatactgcgaaaataataccaaacaacatgttgtttgaaataaatgagaaggcagttaaaccaatacctactaatgttaaaagaataaacgttgttcgtaacaatttttgacgtttttgtttttcttgttgctcaatttcgaaacgttctttcaatttgctatacaagttctctttttcgtttaattcaatgacttgttgtgagtattcttttttcttttcaaaagtctcttcaggaactattttttcttcaacagaatctagttcgctatgaaccgcattatcttcgattttattttcttctaaactacgttctaattgtttaatgtatgcagcttgttcttgtttattcttgatttgctcactgacataacttttcattgcctctgaactatctacgtcatgatgcgtttcagaccaaccaatatttgcttgcaattcatctttatcacgttgtttattcgcaatatccttttcgattgcagtaagttcaaattctttatttttaatttcattttcttgttgattcaaactaatgaaggcgtcaatatcagattgtttaactggctctaattgagtcgcttcttctttaagttgagctaaacgctcatttcttaaaccaatatctctttctaacgattgcttatgcgctcgtgctttttcgtaacgatccacacctttttctgggaatgtgattggctcaatatttaactgttgttctagagacttccattcttgtgaatgatcatgtaaagcaacctctttttgtttttcttcatgcatttttgataattgatttaaattatgctttaaattctctaatcgacgtgatgatttatctcgatcatctactaagcgatgatatgtttctagcttagcttcttcttcacgaatttgactttctagttgttttaattgctcaatttgttgattaatgatcggatttttacctgattttttatataattcatcttttttacgattaatcacttcgcgcattgacgtgaattcagttgatcctaaagcccctgcttgtaataaataatcttgcaattgtttttcatttagatttctatgaatgtcttgaagccctagtacatcaaatgaaaagataccttgatatgtctttttagaaatataattaagtttcttttgtaaccaagcatcatcacgcacagcaccattaggtaaatatactttcacatcaccttgagcactgcctttaattcgttcaacttcaatctctaagccatcatcaagaataagtactaatttaccaccgtattggttacctagacgtggttctagccttggttctttagactttttagttggaaaaccaaataatatcgaatggatgaatgcttgaatcgtcgatttacccgcttcattttcaccaaaaatttcagtgaagtttttattaaattcaattttacgttgaacaaattgaccgtaaccataaatttcaagtgatttaattatcattttgttcacctctcatttcagcttttaatatttcttcagcacgattaactaatgctgtatggtcgaatgttccataatcgtctaggaacttagatgcccttggatttaaatataaatctgacatcgctttatcaaaaacagtttgatcgactaataattccgctgaaaattcattaactaaaggtgactcatcattttgtgcatattgtacttttaactcatcaatatatacaaattgattttcgttttcttcataatctgtaatcatttcttcaacttgtaataaatcttgaggtgaaattaatgtctcactattaataacaagcgttaaacgataaaaggcttttccttcttctctcacttgttctttaaagttttgaatgacctcgtataaaccttgcttagatgtcttatccgtttcaatagttgcttcttcaaatctaatatactgtgtaggataaaatttagtctttaattttaagtggtcaccctcgattaataagcaacctttttcaccttgctcattaaaatgtctaccttgaatattacctgaatagttaattacaggcatatcacttaattgttgacgttcatgtatatgacctaaagcccaataatgatacaatttactgtttaaatcttctaaaatgaactcggtatatctttcgttaactgaagatttactatacgtaccatgcaagacaccaatatgtatgcctttttggccttgacttgatggatattcatcaatcttgttctcataacttgctctattttcataactaaatccgtgaatataaattgtttcaccagatttagtaattgcttcatacgtctcaactttatttgaaaatacagaaacattatctggccagtttgatgaaatctttgatgataatgggtcgtgattaccatgacaaacataaacaaagatttgttcattttgtaaacgttcaaattgctgttttaagaaaatttcagcacgtaatgttctgttttcactatcaaataaatcacccgcgataattacaaaatcaacatcttgttgtaatgcaatatctacaatgtttttaaaactttcataagcacttttttgaacatcctcaaaaattttagggcttatatgactcttagatttgaaaggactatctaaatgtaaatccgaacaatgaataaatttaaccatacatccatatctccttaattaaaggttctaacatcaattttgcaaaatccaactatacaaagcattctaatcactatattcatacttataggtgtagtgattcattagctgatttattaaaaccagtcgccatttttatttcgttaaaaaattattatctacacaataataaagtgctttagtcaaatcgtgatgttttatttattaacaagtttattatttcttcattttaccataatacgcttcatatcgtcgatgaacatatgaaattgagacacatttataacagtttaaaattttatttgtagcgtgcgttgatttttttcaaaaatttcagtcggaaatgcaatttccgtaattgttaacaccgctagtgaaccaactgacacattaaagatttacatgattactctactagatttgctcggcagtaatgaccaattagaaactaaatgtcaaaactatcattgcactaaatacgccaaacattttcaggccgttcttaatgagccattaaaagtgaaacgcttttccatcagtccgatacatgaccgaactaatagtattatgttgaaaactttacacttcaaaatgcaaaaaggaagttaggacacgtttactagcctaacttccgttatcaagctcatctgcccgttttggcatagagctagccatgtttgattgcccagcttccgtcgtccattctgagctaaagctaggacatgtttagtagcctaaattccgatactgaacgcatctgcccaatttgacagagagcctctaacttccgttatcaaaactaaaaaaactacccacaaagtctcggactctgtcggcagtctattcctctatttaaaggattgaaaaatattattttaatattagtcagcgtaaatttcgtctaatggtttaacgataatttggttgatttcttggaatacttgactcattttttgttcagcattcattaatgcagagatgttttcatctttttcaattgcttgcgcttgttcttgcgctttttgtaaatcttcttcagcaatttcttcaccttgcatttgtttttgttggaagttaatttgagtttcacggaactcgtcgaataactttttagattcttcgttagcttttacattagcgaatgcttctttgattgctttgtattcttcgctttctcttaaagcttgttctaattgatttgcataatcatataaatttactgccatggttatagcactcctttgttgtgatgtttattaaaacgttcgatattactttaccacatctcgcttttttagacaaagattgcaaccaaaccttggaaaaatccaataataccacctaaaatgaaacctaatgacataatcaactttagttctttgttagcaatttctataattaatttttcaatataatctaagtcaaacgtattaatttgttcttcaattaatcctcgtaaatccacttttttcataattgtagataagtgaatcgataatttttcaatgattaaatttgctaatttgctagagagttgaccttctaaataatcaacgaattgaggcattaacgtaaccactggcttattcgcttgtttgcttgcatatgttgttacatacactgatagattttcagcgatttcattaaactgcgatgcatctaacagttcattcaatggtttatctttaaaagtttgatattcattggtaattaacgatgtcacaattgttcttgctttaggatgagatgttaaacgtataagttcttgttgaatgcgatctgcaatgctctcttttgtcataaacatttgcaacataccaaataacttacctttctcattgaaaaaagtatccaacatatcattaatatcttgtgtgccttttgcagatgataaataattccttgcacgatcacataataagtctgttgcgttatctacatgctgatctaaaaatgttacaagttgatttggcaataaagatgctattgtttggttttgatgctttgtataataattattcaattgtgattcaatatattgatttccattagtttgtaatacttgttctaaatcaatatcgatttgagaagtaatttgttttattgacaattgatctttcgtcaacttttgtaactgctgttgaatcatagattctattgcttgctgtgattgctcgctttttaatttttcattaattaaagtttctgtaagcaaatgctcttcaatcacttggccaattttagttgcaatttcttcgcgtcttttcggtattaaacctggtgtaaatgggactctaaatttaaatatatagtatggtttaaaggggtgaaacagcattctaattgcaattacattagtaatgcccccaattatcgcccctactacaatcataaatatgataataaatagtgcattcataattttgactcctttgtgacaacatagttattcattataccactatttttattttttaattcattaatcatttcactttctgctcaatttattattagtttacatacaaaaagcgatgcctcacctctcgaaacaggtgtgttacatcgcttttattatttattaaaagtatataggcctagatatgtactaattcttctttagcatttctgttaaagtatgtttcagcttctctcattttagaagtaccgaaaattggttggttatctggatttaatacacgataaatattgcttactttgttactttgtaaaatgtacccattacgagtctcaatgttattccaataaatatcacttgttggtgcatggtttggatatgcacagtgatttcttgaaattgtttgaacgatttctaatggatcacagccaaatgtactgtttaatacttcagagtctctgaataatgcacaaattgaaatacaagttgtccagtttggtaatactctctctttttcgatttgtactaaagtctttttagaaagtccaattgtttgcgccatagtatcttgcgtataaccagcctctatacgaaccattttaaattttgtttgaattaaatctgtaaaactctgtctatccattctgttatctacctttctgtttggggaattttatccggacacaagaaattgcaataatacacatttcttgaaacacagattacatcttaatatatttttaataaaatgaaaagagtcaatttcacatttgtattaaattttgatcaagtcaacaagagttaagtttactttataatgaagcgaaagtaaatgaagtaaaattttatgcataatcactagatttgataaaaattacacttttataatgatatcaaatttacaaagaaaactgtataataaaccctatcgctataaaaaattcatcaaaatcagattaaaaattgtctatttttcgacaaatatttaaaagctcattctaaatcaacttattttccattgcataaattgctgcttgtgtacgatcgctaacttgtaatttactaaatatatgactgacatgtgttttaattgttttttcagatacaaataaagtttctgcaatctctttatttgttttacctttaaccatttcacgtaacacttcaatttctctctttgacaacttattcgtgtagtgtggtttttggctaactgtttcgaatacatcttgtgccttaggatgtatcattttttcaccgttcataactcgtctaatagtttcaattaattgctgaggctcaacgtctttcatttcataaccatcagcacctttattgattgctgaaattacatgttcatcatcaacataacttgttaataccaaaactttaatatccggataatgtgccttaatatattccgtaatttcaataccattcatgccaggcatcactaaatctaatagcacaatatcagggtgctcatgctcttttaaatattctaaaaatgtttctccatctgcaaagtcttgtaaaacttctatgttttcaatcgtggataataaaaatcgcaatccttgtcgcacaatataatggtcatctactaatattactttgttcatgggttatctccttaaatcaagctattttataggaattgtgaattgtatttgtgtaccctttgttggctgagaatgaaaggtcactctacctcttaataatttaactctttgttttatgttattaataccgtgtgatgaagctatctgaacattatcgatctcaaatccttgaccataatcaatcacgtcaatatatagtatatcgttcatttgttttaatgtaagatccattttattcgtatcagcatgtttcttaacattattaatacactcttgtaatgctctatatatgttttcttcgatttcattagataaatcgattaaaccttctacatttacatttaattgtatatggattaatttactatatgctgtcaaagcatgaattaaaccttgctcaagtccaactggcttaagttgccaaatcaatgcacgcatttcattaacggcattttgactcgtttcctcaatcgtcttgaatgcttgtttagcgatggattcgtttgacatgccatacgcagcatgtgctgttagttttacagaaaataacatttgatttactgaatcatgtaaatctctagctaaacgattacgttcattaatttttgctgcttctttttcacggtctgttaaataaatacgtttgatggctgaccctaattgaaatgcgacagactctagcaactctaaatcttcatcactatatatttcagtatttggtgacgctacatttaaaatgccgaattgttcttgacccgatttaagtggtaccgttgcatgatgtgtaatattgtcattttggctaggaaatgctttagaggctaagttaatacgagaacaattgacgatattcgacgctttcattagcctacgttgattaaatgctttcacacaccaacaagacccatctttaatatagtgacagtggtctgctgtcaaagattgtggtagagccacatgtgatacaagttcatgttcacctacgctattgatgaaaaatatccagcctgtcgtgaaattactgccctcaattaaatattttaacgcaccttgggtcatgctatacatttcagtttcttcgtttaaaaattcggcaatctcttttaataaagctagtcgcgtcctttgttccatcaaatcgctccaattcatttttacgtgtattaactattatacattgagttattatatttttaaatcttagacgtgaacatgataaaatggccttgattactcaatagttatatttcggagaactgatttgtgatatgatattaaagactataggaggattttatgaaatttaaaataccagaaaactttaatgacttaagtttacgagatattttccaacaacttaaggtacctaaaaaagatttacatcatttaaatatgtctaaagatattactattaatgataaacctgcgcgattaatggataaagtgcatactggcgacgatgtatttgttccaaccatcgatgaaaaaagtaattatgttccaagttatcgttatgcacaaattaaatacgaagacgatgatatggcaatcgtaatgaaacctaaaggtgttaagactcaccctaatgatttaaaagaaagcaatactttaatgaatcatgtgatttacactattgatagtgactatgtcgaaccaattcatcgactggaccaggaaacagtaggattattaattgttgctaaaaatcctttaatgaaaaaaattcttgatcgcatgttagaagacaatgatattacgcggatatacaaagcaaatgttaaggcacttttacctttgaaaccacaaacgattgatatgccaattggtaaagataaattccattcgaataaacgacgtgtgtctcctactggacagcgtgcaattacacacattttaacttcaaaaatgataaaagaagctgtgtgccaacttgaaatcaagttggatactggacgtactcatcaaattcgtgtgcatttagctgaaattggtcaccctgttattggtgatcctttatatggtgattcaacgttaagacaattagaacttgaaagttacaaaatagagtttgtgcatcccttgactaaggaagtcatttccgtttctttggatgactaatttgattagttttgcatgatatttaaacatgcaataccgcattgtaactaaatcaagtatcaacttaaatcggatagatggaaaattattaattttttcagatgttcggttttttgttttttacgatgcttaggattttatattttgatattttagtaattattcattttataacatccttggataataacttgtagtctttttcaactgcgttacgtgtatctatggacaatacatgacatcataagatttttatcacaggttgtttggccaatacatgtacaacaattcatcatataaaaaataggttctataataaaacggactccatgaaaagttttttctttcacggctctatatcaaatcagacttataagttcaatttgacatagacaaaaaataaagcttgaacactacatctacctgtaatgcccaaactttattttatattaatatttaattaatgaggatctaccatatcttctggtttaatccatgcttcaaattgttcttctgtaacatatccagtttgaattgcagattcttttaaagttaaaccttctttatgggctttcttagcaatttgagctgctttttcataaccaatatgtggatttaatgcagtaactaacattaatgattgatttaaataattatcaatattctcttcgattggttcaatgcccactgcgcaattgttattaaatgtttccataccatcagctaaaaggtaaattgattgtagtgtattatgcataataactggtttataaacattcaattcaaagttaccttgtgaacttgcgaagccaacaactgtatcattacccattacttggactgcaaccattgttaacatttcacattgtgtaggattaactttaccaggcataattgatgaacctggttcattttcagggatagaaatttctgccaaaccagctcgtggccctgaagccaaccatctcacatcattagcaattttcattaagtctcctgctagcgccttcaatgttccatgtagttgtactacttcatcatgtgctgttaatgcatggaatttattttcagaagatacaaatggataacccgtattttctgaaatataatgtgccactttatcaccaaattcaggatgcgcattaataccagtaccaacagccgtaccaccgatggcaagatttaaaatgtgcttcttagattcagataacattatttcgcaacggtcaagcatataacgccagccactaatctcttgtcctagtttgatcggcgttgcatcttgtaaatgtgtacgaccaattttaataattgaatcaaatttgtcttctttttctttcaaagtatttcttaaaagttttaatgcaggttctaattttgtttcaacctcttgatataatgcaacgtgcatagcagttgggaatgtatcattcgaactttgtgatttatttacatcatcatttgggtggatactttcatcaatttgatgatcttttaaatacatattagcaacataacttactacttcgttcacattcatattactttgtgtaccgcttcctgtttgccatacaactagtgggaagtgttcatctaattcacctgataaaatttgatcacatgcgtatacaatggcatctttctttgcctcgcttaattttcctaaatcaaaattagctaatgctgctgcacgctttagttgtgcaaaaccataaactacttcgattggcatacgctctttaccaactgggaaattgcgtttacttctttctgtttgagcaccccaatatttatctgcaggtacttctatttctccaaaagtatcatgttcaattcttactgacattcaatttctccccttatcactgtttatttaactgtagtatatcattaaataatttaattgagcaatttatgattaaaacgttttcataatttgaaataaaaatacactaatcgcacgtactcaccctttattacagtgatacggtcatacgattagtgtgttatctatcattatttagttattgttgaactaagtttaattacgatactttgttttagtagcttcaaccgtagcaatagctgtaagtatatataatacagcactaacaattgtcgtatatggatttagagcaacaagcgtacctaaaactcctgttaaactcgcataaaacccatcaagtgtataatacaatattcctgttattaataaacaacaaattacacttattacaatacctgattgattacttttaatgaacgtttgcgcattaacatcatcgattaatccttttgataaattgagttgtaattttattactttgaaaataacaggtaaatataatgccccaattgccaatggaaaagctttaattgatattaaacttataataactgttgctatcaataattgaatccagtattttcctaacataaatatataaatctcctctaatttcattcttcaatagcatatcataatcttggcatattaagaaacgcggtttaatgatttcattaaaaatattactgatagatgacttctttcaattatgtctggagtaattaattatcaattccgtttaaatggtgttttaatatttaaaattgaacttttgatatattactatgtctggtacacaaatcaatgttttatgctttacaaagttatattggcagtagttaactgcagtccacaaacatagaagctggtggaaagtcagcttactatttcatgcaagttggcggagctccaacatagtggaattggattcccaatttctacagacattgcaaattggggaaacgggccacaacatagaaaaattggatcctcaatttctacaaacaatgtaagttggggaaacagccccaacactgaaactggcagaaagtcagcttctatgaatataataaaaaagctaggtaacaaaatgctacctaacttcatattcaagataatcaatcctatttgatatatgttctatactatacattatttacatgataaataactgaatattacacaattataatactttactgactgtcttcttcagaattcttttcttgatcattttgatcagagatttgttccatttctttacctaattcttttaaatcttcaaaatccgttaccatactgttttcttcttcatgataatttaattttggatctttgtctttagacataatcaatacctcacagatttttaattaagcaaagcgtgacgtaaagtaagctttaacatcttcaggtaaacctgcagccgcttctttatcaagaataacatttaccattctatgtgcttttaaatcggctggttcgaagcttgttttaccattttcttgatataatttttcaactacatctcgtttattagcacctgtcactactaagaaaatttctcttgcttccattagtccttgacgaatactaacatttaacttaccttgctcatcgatagaaacaacttgtaatgttaatttccctttattttctttagttttaatcttatcagcgattaattcgattgcatctttttcataagcaattggataaacttgacctgctggtacacctaacgcttcgaaatatgattttttatcgtcataatctaaaatatttatttggctaaaatcaacagcatgtttttcaacatttttctttaattcatctagaactggcgcttgatctgtatctaaatgaaaacctgcaattgtagtaggattattgttaaattgctttctaataatatcagcagcatattctgctacaagttgactattgtcaaagactttaaagttcattgccatgatttctacactcctcttagtttgcattttacataaaaacggcgatattaataattattataccctaactttcaatatatcaaaccatttaactttaacatgcttatactctaaatatagcacttaagcatcatttttataatgaaaatgagtaaattttaattcaatcccggaaaatcttgttgacgtaacgcttcataaattaacaacgcagcagtatttgataaatttaatgaacgaatatgttcactcataggaattcttaatgctgtgtcttgatatttctctttcacccagtctggtaatcctgtcgtctcttttccaaaaatgaagtaaaaatctttgtcatgatttgaaaaatcaaaatcactataagtctttttaccaaattttgttaataagtaatactcgccatttgtggcttcaaaaaatgcttcaatactatcatgatacgtaatattcacaaattcccaataatctaaaccggctctttttaacattttatcatcagttctaaatccaagaggtttaattaaatgtaaatgtgtgtttgtacctgcacacgtacgtgcaatgttaccagtattagctgggatttctggttgatataaaacgatatgatttgtcatattactattctctccttgtgtctaatccttttatcatttcattttgaacttctgcatcctcttgatcataatttgcattgataaaatctcttgcttcttccccaagaatttgaccaatggcccaataagcagttgctcgaatcatcggtctttcatctgttgttgcaacttttttcaattctggaattgcatccacttcattaaaatgcgccaatcctaaaatagcatttcgttgtatcggttttttaccacgccaagcacctgcaaggtgaccatatgtttgtttgaattctttattagacatacgtagtaaaggtactaatcttggctttaaaatttctggttccaaaatgatgtcatcttgttcggtattaatacctctatttttcggacaaacttgttgacacgtatcgcaaccatataatctattcccaattttataacgatattggtcaggcatatagccttttgtttgcgttaaaaaactaatgcatttctgactatttaattggccatttccaactaatgcacttgttggacaacgatcaacacaaattgtacaatcaccacagctatctaataatggatcatcaggttcaaaaggtatactgactaacatttcaccgaggtatgtccatgttcctagtttaggattgatgacaaagccattacgaccaacaaatcctaaacctgcacgttctgctactgccctatctgataatacacccgtatctaccatagattttatttcaacatctggaactttagattcaataaatgaagctaacatgtctaatcgtttacgcataattgtatgataatcttgaccccacgatgctctagcaaataagcctctgcgatcacctctaacactcttaggtgcacctttcagtttgttaggataaccaactgcaattgctatgattgaccttgctgttggtaaggataatttaggctccgttcgtaaagcaatatcagattcttcaaatcctgaggcataaccatttgcatgatatgcttctagcttttgcttcaattcatcaaagggatcggcagttgtaaatccaatactgtcgataccaattgtatatgcatagtcaatgatatcttgctttaactgctttgtatccaatcgtatgccccccattaaataatactatgttattttaacacaaccattattcatattgaggtttcatttcacataattttaataataaaaagcttgaatatatgatataactttgtggtgcgtatcatatattcaagcttcgttaggttgttataatactcttgctaagaaattttgtgttctttcatgttgcggttgttcaaatatttcgactggtgtgcctgactctacgacaacgccatctgccataaatatgactttgtcacttacatctttggcaaatcccatttcatgtgtcacaaccaccatggtcataccttctttggctaggtctttcattacttttaatacatcaccaactacctcaggatctaatgctgaagttggttcatcgaataaaataacatctggatgcattgctaaagctcttgcaattgctaccctttgcttttgaccacctgataattgattcggatatacatctgctttttcttttaatcccactttatctaataacgacaatgcttccttatgtaattcatcgttattatctttctttaataatttaggagctaaaataatattatcgacaacttttttatgtggaaataggttgaagttttgaaataccatacccattttttgacgtagtttatctacttgtgtccctttttccgttaagtcattgccttcaaaaatcacttgacctttagtgggtacttctaataaattcatacatcttaacaatgtacttttaccactaccagatggacctattattgctactacttccccttgattgatttcaagattgatatcttttaaaacttcattatctccaaaaactttattaagattgtttattttaatcactggcattcaatctcccttcaatcatgttcataatgcgtgtaagtacaaatgttaagacaaagtataatgctgctgccactattaatggtgtgaatgggtcaaatgaaataccttgaaccacttgtgcattaaacataatttcgccaactccaattgttgacacaatagatgattctttaattaaagtgacaaattcattacctaaagctggtaaaatatttttaattgcttgtggcataattacacttttcatcgtttgtctataattcaaacctagactacgtgcggcttccatttggcctttatcaacagcatttatacctgcacgaataatttcagcaatgtaagctgaggaattaataactaatgcaattgttccacaaacaagagctgaaatgtctagtcctaatgcagcagttataccaaagaatacgataaatacttgaactaacattggtgttcctcttaatatttcgatatagatagaagcaatccatgaaataatttttattttacttaatttcattaacgcaacgaatgcacctaaaatagaacctaatgcaacaccgataagtgaaattaatattgtaatcttaattcctttcaagaaaaaactaccatacttagaaataaaaccactgtcatcattcatcgcatttgcagcattagtcatatatttatcgattaatcctttatctttaacctccttaatcgttttattaatttgtgacaataattttggtgaatcttttggcactgctatcactgtatctttttcttcttcattaaatttcacattggaaattcctaatttaggattttgttttaaatatgcttctgctacaggtttttcaactacagcaccttcaacctttccacttttaagtgctaatataacgtctggtaaacggcttaatgaagtaatagatgcattttcaatttcggtttgagcgattttttcttgttcagttcccttttgtgcccctacttttttattattaaagtctttgatatctttatattcattaactttatctttctttacaagcatgatatttttagtcatcatatatgaatctgaaaaatcaacttgcttcttacgttcaggcgttgaagtcattccggaaataataatatcaatttttccagttttaagagctcctaacaaactatcaaatgacatattgacgatttttaattttaaattattatctttcgcaatttttttagctaaatcaatatctacacctgcatactcagtcttaccattaactgtatgctcaaattccattggtgcataatctgcagaaagacccactctaagttcaccgcgttctttaatcttctcccatgtttgatcttgttcagcatgtgctgtgggattgatatacaccatagcactgctaattaacaaccctaatactaatataaacctaattaaacacttcatttatacagccctccctaattaatattcataattatacatattaatacattttgatgcaatagtgttttataaatgtatttttattaatataaagaaaatcttctttttaaaagactgtacataaaaaatccgctattatacgtgaacaaatctcacattttaaaatcaatcaaaaaagcgctactatcaatatcttattgacagtaacgcctatatttatcatatattaaaacttattcttgtcatcaagctataaattattgttttggaacttcaaatttataaatatcattagaatatataggaatgaattttttacacaattcatgaacaataaatgccgatacaaatggtatgacaaaataaccaagtgctaataaaataatattcattgttggatcacctgacattcggttaaatgcatttattgggccaactaatcctgtatatccaaatccagcagacaatggtgttcctttaacctgaagaacgtaagcaatgattccagtaattattccatttatagtcaatggtatcgaaataattaaatttttcaagtaaactgggatcatcatttttgcagctcctatgagtaaaactgcatttacaccaatagaattgacacgcaatgagccaaataagaaagtaacacaggcagccactatacctaggtttgctgctccacttcctagtccgtttaaactaatcgcagttgcaatcgctactaacgatattggtgttaccattaataatgaaaatgccacactaataagtatagacattaacaacggatttaagtctgtaaaagaatgaattacatttccaattgcttgagtaatttttcgaatgtaaggtaatgtgattagaccgatacccccactaacgataggtactaaaactggtaatataattaattcaaaagatccaagtttgttttgtaataccatatatataagacatgcaataataacaaccaaactcgtatttataatgtcacctataccttttaacataaaactattattgctatatacaacagcacctgaaccaatcatagctgatgtacctactatagcagcacctgcaccattaaatttaaattgatgagcagctaaaaccccaataataaatgccataaatgattgaattagtatcactaactgatacgttaattctaaaatttcattaccacttttaaatatttttaatacttcacctaataaagcattcggaacaagtgcaataacaacaccagcaccaatagaatttaaaatcttactgaaaaactgtttattatcagcattatttgcgttactcataaacgacctccaatttgaacattaaactcatcatattatagaaaattaactttaacaatgattagttggctaatttaatctaaatataacaatccacaaattgaataaagcaaatttaaacaatctactcactaatcaatgtcatgttaattttaaaatactactaattacatcctgtgactaataatgtaataaattgtaaatattaaaatagccatattactattaagatagataaattgaatcgacttggtataaagcacaataaaatagcacttttacaaatatattattagaaaagttgaaacaaatatataaccccagataatataatcattatcattaatgtaataccaaaaaaagaagttaaacaatgtatagttgcttaacttccaatattgaactcatcattacaatttgacatagagtctattaaagcgtgtgccatttgagtccacttttatttgtattgtatagagagaaataaaaagaaaccttgttttacaaggtttctaatacgttatgttatgtaaataacagttaattataccggtggtcggggtcgaaccgacactccacaagtggaacgggattttgagtcccgcgcgtctgccaattccgccacaccggcttaatggtaaacaaaaaacttccctttggaagcaattatggagcggaagataggatttacacctatacctcattccaggaaggaatgtattctaagagttgaaatactcccgcattattattaaattatggagcggaagataggatttgcacctatacctcgttccgggaaggaacgtgttctaaaagttgaactactcccgcataaacctggaggcggcaaccggatttgaaccggtgataaaggttttgcagacctctgccttaccacttggctatgccgccaataactgggctagctggattcgaaccaacgagtgacggagtcaaagtccgttgccttaccgcttggctatagcccattaataataagggcggctgaaggggatcgaaccctcgaatgtcggaaccacaatccgatgtgttaaccacttcaccacagccgccatggcaggggcagtaggaatcgaacccacaccaaaggttttggagacctctattctaccgttgaactatgcccctattaaaaataataaatggaggggggcagattcgaactgccgaacccgaaggagcggatttacagtccgccgcgtttagccacttcgctacccctccataaatggtgccggccagaggacttgaacccccaacctactgattacaagtcagttgctctaccaattgagctaggccggctaagaaatggttcaggacagagtcgaactgccgacacatggagcttcaatccattgctctaccaactgagctactgaaccataataaaaatgtaatgatggcggtctcgacgggaatcgaacccgcgatctcctgcgtgacaggcaggcgtgttaaccgctacactacgagacctataaaatattgcgggaggcggatttgaaccaccgaccttcgggttatgagcccgacgagctaccgaactgctccatcccgcgataataaaaaataatggcggaggaagagggattcgaacccccgcggcccgttaaggccctgtcggttttcaagaccgatcccttcagccggacttgggtattcctccattattataggtaaatcgctattaattataaaattaaatggcggtctcgacgggaatcgaacccgcgatctcctgcgtgacaggcaggcgtgttaaccgctacactacgagaccattagtaaaacggaggaagagggattcgaacccccgcgagccgttaagcccctgtcggttttcaagaccgatcccttcagccggacttgggtattcctccaaaattatatggaccttgcaggactcgaacctgcgaccgaacggttatgagccgttagctctaaccaactgagctaaaggtcctaaatataattttacaactaataaatagtggcggtggaggggatcgaacccccgacctcacgggtatgaaccgtacgctctagccagctgagctacaccgccttatatagtttgtaaataatatggtggagactagcgggatcgaaccgctgacctcctgcgtgcaaagcaggcgctctcccagctgagctaagcccccataataattacagtatatcgggaagacaggattcgaacctgcgaccccttggtcccaaaccaagtgctctaccaagctgagctacttcccgtataattaacgcgcccgataggagtcgaacccataacctcttgatccgtagtcaaacgctctatccaattgagctacgggcgcatatgtttttattgaaaatggtgccgaggaccggaatcgaaccggtacggtgatcactcaccgcaggattttaagtcctgtgcgtctgccagttccgccaccccggcactataaaaatggagcagaagacgggattcgaacccgcgaccccaaccttggcaaggttgtattctaccgctgaactacttctgcatatgcgggtgaagggagtcgaacccccacgccgtaaggcgctagatcctaagtctagtgcgtctgccaattccgccacacccgcaaatggtgagccatagaggattcgaacctctgaccctctgattaaaagtcagatgctctaccaactgagctaatggctcttccatggtgccggccagaggacttgaacccccaacctactgattacaagtcagttgctctaccaattgagctaggccggcaatatgtaagaataaatggtggagaatgacgggttcgaaccgccgaccctctgcttgtaaggcagatgctctcccagctgagctaattctccgatttaaaactgcctggcaacgttctactctagcggaacgtaagttcgactaccatcgacgctaaggagcttaacttctgtgttcggcatgggaacaggtgtgacctccttgctatagtcaccagacatatgaatgtaatttatacattcaaaactagatagtaagtaaaagtgattttgcttcgcaaaacatttattttgattaagtcttcgatcgattagtattcgtcagctccacatgtcaccatgcttccacctcgaacctattaacctcatcatctttgagggatcttataaccgaagttgggaaatctcatcttgaggggggcttcatgcttagatgctttcagcacttatcccgtccacacatagctacccagctatgccgttggcacgacaactggtacaccagaggtatgtccatcccggtcctctcgtactaaggacagctcctctcaaatttcctacgcccacgacggatagggaccgaactgtctcacgacgttctgaacccagctcgcgtaccgctttaatgggcgaacagcccaacccttgggaccgactacagccccaggatgcgatgagccgacatcgaggtgccaaacctccccgtcgatgtgaactcttgggggagataagcctgttatccccggggtagcttttatccgttgagcgatggcccttccatgcggaaccaccggatcactaagtccgtctttcgaccctgctcgacttgtaggtctcgcagtcaagctcccttatgcctttacactctatgaatgatttccaaccattctgagggaacctttgagcgcctccgttaccttttaggaggcgaccgccccagtcaaactgcccgcctgacactgtctcccaccacgataagtggtgcgggttagaaagccaacacagctagggtagtatcccaccagcgcctccacgtaagctagcgctcacgtttcaaaggctcctacctatcctgtacaagctgtgccgaatttcaatatcaggctacagtaaagctccacggggtctttccgtcctgtcgcgggtaacctgcatcttcacaggtactatgatttcaccgagtctctcgttgagacagtgcccaaatcgttacgcctttcgtgcgggtcggaacttacccgacaaggaatttcgctaccttaggaccgttatagttacggccgccgtttactggggcttcgattcgtagcttcgcagaagctaaccactcctcttaaccttccagcaccgggcaggcgtcagcccctatacatcaccttacggtttagcagagacctgtgtttttgataaacagtcgcttgggcctattcactgcggctcttctgggcgttaaccctaaagagcaccccttctcccgaagttacggggtcattttgccgagttccttaacgagagttcgctcgctcaccttagaattctcatcttgactacctgtgtcggtttgcggtacgggcacctattttctatctagaggcttttctcggcagtgtgaaatcaacgactcgaagacacaatgtcttctccccatcacagctcagccttaacgagtaccggatttgcctaatactcagccttactgcttagacgtgcaatccaatcgcacgcttcgcctatcctactgcgtcccccccatcgattaaaacgattataggtggtacaggaatatcaacctgttatccatcgcctacgcctgtcggcctcagcttaggacccgactaacccagagcggacgagccttcctctggaaaccttagtcaatcggtggacgggattctcacccgtctttcgctactcacaccggcattctcacttctaagcgctccacatgtccttacgatcatgcttcaacgcccttagaacgctctcctaccattgtccaaaggacaatccacagcttcggtaatatgtttagccccggtacattttcggcgcagtgtcactcgactagtgagctattacgcactctttaaatgatggctgcttctaagccaacatcctagttgtctgggcaacgccacatccttttccacttaacatatattttgggaccttagctggtggtctgggctgtttccctttcgaacacggaccttatcacccatgttctgactcccaagttaaattaattggcattcggagtttgtctgaattcggtaacccgagaggggcccctcgtccaaacagtgctctacctccaataatcatcacttgaggctagccctaaagctatttcggagagaaccagctatctccaggttcgattggaatttctccgctaccctcagttcatccgctcacttttcaacgtaagtcggttcggtcctccattcagtgttacctgaacttcaacctgaccaagggtagatcacctggtttcgggtctacgaccaaatactaaacgccctattcagactcgctttcgctacggctccacatttactgcttaaccttgcatcaaatcgtaactcgccggttcattctacaaaaggcacgccatcacccattaacgggctctgactacttgtaagcacacggtttcaggttctatttcactccccttccggggtgcttttcacctttccctcacggtactggttcactatcggtcactagagagtatttagccttaggagatggtcctcccagattccgacggaatttcacgtgctccgtcgtactcaggatccactcaagagagacaacattttcgactacaggattattaccttctttgattcatctttccagatgattcgtctaatgtcgtcctttgtaactccgtatagagtgtcctacaaccccaacaagcaagcttgttggtttgggctcttcccgtttcgctcgccgctactaagggaatcgaattttctttctcttcctccgggtactaagatgtttcagttctccgggtgtgccttctgatatgctatgtattcacatatcgataacatgacataactcatgctgggtttccccattcggaaatctctggatcaaagcttacttacagctccccaaagcatatcgtcgttagtaacgtccttcatcggcttctagtgccaaggcatccaccgtgcgcccttaataacttaatctatgtttccaccatttttataagtcaaacgctcacatacggcttcgttttcattattttaaatgctcatttacataagtaaactctgctttaaaataatttaactcattgtctgctaaacgttttcttttataaaaagatttaaacgcgttattaatcttgtgagtgttctttcgaacactagcgattatttcttatgaattcaagcttatttaaaactctttattcactcggttttgcttggtaaaatctatattttacttacttatctagttttcaatgtacaaataatggtggagactagcgggatcgaaccgctgacctcctgcgtgcaaagcaggcgctctcccagctgagctaagcccccaaataggtattaaattaatggtgggcctaagtggactcgaaccaccgacctcacgcttatcaggcgtgcgctctaaccagctgagctataggcccattaatttgaatgaacaaacattcaaaactgaatacaatatgtcacgttattccgcatcttctgaagaagatgttccgaatatatccttagaaaggaggtgatccagccgcaccttccgatacggctaccttgttacgacttcaccccaatcatttgtcccaccttcgacggctagctcctaaaaggttactccaccggcttcgggtgttacaaactctcgtggtgtgacgggcggtgtgtacaagacccgggaacgtattcaccgtagcatgctgatctacgattactagcgattccagcttcatgtagtcgagttgcagactacaatccgaactgagaacaactttatgggatttgcttgacctcacggtttcgctgccctttgtattgtccattgtagcacgtgtgtagcccaaatcataaggggcatgatgatttgacgtcatccctaccttcctccggtttgtcaccggcagtcaacttagagtgcccaacttaatgatggcaactaagcttaagggttgcgctcgttgcgggacttaacccaacatctcacgacacgagctgacgacaaccatgcaccacctgtcactttgtcccccgaaggggaaagctctatctctagagttgtcaaaggatgtcaagatttggtaaggttcttcgcgttgcttcgaattaaaccacatgctccaccgcttgtgcgggtccccgtcaattcctttgagtttcaaccttgcggtcgtactccccaggcggagtgcttaatgcgttagctgcagcactaaggggcggaaaccccctaacacttagcactcatcgtttacggcgtggactaccagggtatctaatcctgtttgatccccacgctttcgcacatcagcgtcagttacagaccagaaagtcgccttcgccactggtgttcctccatatctctgcgcatttcaccgctacacatggaattccactttcctcttctgcactcaagttttccagtttccaatgaccctccacggttgagccgtgggctttcacatcagacttaaaaaaccgcctacgcgcgctttacgcccaataattccggataacgcttgccacctacgtattaccgcggctgctggcacgtagttagccgtggctttctgattaggtaccgtcaagatgtgcacagttacttacacatatgttcttccctaataacagagttttacgatccgaagaccttcatcactcacgcggcgttgctccgtcaggctttcgcccattgcggaagattccctactgctgcctcccgtaggagtctggaccgtgtctcagttccagtgtggccgatcaccctctcaggtcggctatgcatcgttgccttggtaagccgttaccttaccaactagctaatgcagcgcggatccatctataagtgacagcaagaccgtctttcacttttgaaccatgcggttcaaaatattatccggtattagctccggtttcccgaagttatcccagtcttataggtaggttatccacgtgttactcacccgtccgccgctaacatcagagaagcaagcttctcatccgttcgctcgacttgcatgtattaggcacgccgccagcgttcatcctgagccaggatcaaactctccataaaaatttatgatgtttgattagctcataaatactaaataatgtttgtaactaatagttacgtttttggaattaacgttgacatattgtcattcagttttcaatgttcgtttgtcacttacaagatttaattataactcgtaagtttttgtaagtcaagaattatttttaattattttatttctaaaaaataaatttcctaactcaattaattcaacaaatattattttattatgtatttgttcgaatttcaatagtcaaatttacactttattaatattttaaatcaacaacttaaaacatttgttttttaaatattagtgccgtttgacgacttttatataatatcaagttattctagtagagtcaacataaaacaacacttatttttgtttaaaaattactgttgaagggattattttctattcgtaagtactatatgtatttaaagtgtaattccttacgctttttacttcagttttacaaacaaacttatactcactttatggatagttatttagtagaccttcgtttgaatatttttatgtttatttataaaggatactagttattagttaataccacttccgtagttagaatgttcttttcttctatttaaatatttttcagaataagcataaaaaagaagttaaacaactttcatgtcgtttaacttcttaaatattacgcttacttatatgaagtaagctaacgcctttttaatttgtcatactaccaaagttaaattatttatcttggcattctttacaaactccataaatttccattcgatgatgtgttacgtcaaagtcagtcatatgctgagctaatctttcaatttcatttaactgtggatattgaaaatcaacaatcttaccacattgttcacatataatatgataatgattatgtgtattaaagtcgaatcgacttgatgagtctccatatgttaattcttttacaattccaatatctttaaacactcttaagttattatatattgtcgcaacacttatatttggaaaatcaggtgaaagtgcttgataaatttcatcagctgttggatgagtatgtgaagaaattaaataacgtaatattgcttgtctttgaggtgtaattcttacgcctgcttgtcgcaatgatgcaattgattcttctagttcatgttcaattgattctatttcaacactcatctatatcaccatctttcttatataataattattattacttactataaatataactgtagtattgcgcgcgtgtcaatatttacatgatgatttcatttaatagccttttttagcatcaacttcattctcaattagatcattcttattgagaaaattaactagattgtttttaaaaatatctaataagtcatactttgcctcataatcattaccagttatatgcgctgttatagttacattatccaattcatataattcatgattaggtttcaaaggttcattttcaaacacatctaaatatgcatgtcgaataactttactttttaatacttctattaagagcgcttctttaactatgctacctcgtcctatatttataaaaagtgcttcatctttcattaattcaaaatgttttttctttagtaaatgaatcgtttcttgcgtttctggtaaagcatttataataatgtcagcatttggtaatgtgctttcaagtgattcgatagtatatatctcgtcaaactcatctttgttctgacctgacttgctcagaccaattaaattcatattaaaagcctttgctaacttcgcagttctagtagcaattgcacctgtacctaaaaataaaactgtttgtcctgataggcgtttaccagttattttcgaatcatatatatgttgtcgttggttatcatatgatagtttcatctttttataatcatctaaaatgaaagctaaaatgtattcagataattgtttagcttgaacaccttttccattagttaaaagtatgccgtgatctgcaatataatctaacggcaatgtatttacacccgttgcaaaccatgcaatccattttaaattcgggcaacgttgtaaaaatgcctcattgataccgccatcataaccaactaatatatctaaatcagccaagtcgctctcaggtatttctgatgcttttttataaaatttaaaatctaaatctgaaaagcgttgttgtaattcagtttcaacttcacgcatacgattcaacccaacaactttcatatatgtcaccccaaaatgtttttaagttcttctatttgtgttttaaccttaaccttctcgataacatctaatactttaccttgttcatctattataaaagtcgttcttacaatgcccatactttctttgccaaatgatttttttaactgatatacgccagtttctttagctaatttaaaatcttcatctactaataaatcgaaattcaatccgtgtttctcaataaaattttggtgttttttctttgaatcaccgcttataccatatactgcaacatctaaatcattgaacatttctaaattgtctctaaagtcacaagcttctatggtacaagtaggtgtattatctctaggataaaaatatataatcgcctttttaccttttaatgtatcatttgtaatgacagttccgtcttgattttctaatttaaatattggaaattgttctcctttttgcaacatataatcacctttttcttcattataataattttatgatacgatattagatgaaaatattaaattaaaagaggttgatataaatgaattttagtgaaagtgaacgtttacaacaactttcaaacgaatatattctaggcggtgtcaattccccttctcgttcttataaagctgtaggaggcggtgcacctgttgttatgaaagaaggacacggtgcatatttatatgatgtcgatggcaataaatttattgattaccttcaagcatacggtccaattattacggggcatgcacatcctcatattactaaagcaattcaagaacaagctgctaaaggtgttttatttggtacaccgactgaattagaaattgaattcagcaaaaaattacgtgatgcaattccatctcttgagaaaattcgctttgtaaattctggaacagaagcagtcatgacaacaattcgtgttgcacgtgcatatactaaaagaaataaaattataaaatttgctggatcttatcatggccattctgatttagtattggttgcagcaggtagcggcccatctcagctcggttctccagactcagctggtgttccagaaagcgtcgcacgtgaagtcattactgtacctttcaatgatattaacgcctataaagaagcaattgaattttggggtgatgaaattgccgcagtattagtagaaccaattgttggtaactttggaatggtaatgcctcaacctggatttttagaagaggttaatgaaatttcacataacaatgggaccctagtgatttatgatgaagtaattactgcattccgtttccattacggtgccgctcaagatttattaggtgttatccctgatttaactgcatttggtaaaattgttggcggtggtttaccaattggaggctatggtggacgtcaagatattatggaacaagtagcacctctaggacctgcatatcaagctggtacaatggctggtaacccgttatctatgaaagcaggtattgcattactcgaagtactagaacaagacggtgtttatgaaaaattagacagcttaggccaacaactagaagaaggtttacttaaattaatcgaaaaacataatatcacagctacaattaatcgtatttatggatctttaacattgtactttacagatgaaaaagtcacacattatgatcaagttgaacattctgacggcgaagcgttcggtaaatttttcaaattaatgttaaatcaaggtatcaatttagcaccttctaagtttgaagcttggttcttaacaactgaacatacagaagaagatattcaacaaactttaaaagctgcagactatgcttttagtcaaatgaaataacttttaaggaagtatatttttaattgaattaaaataaaacaaatgctcacatagtagattcattttatatcgttaactattaacgtttaacttgatatgtcactatgtgagtttttattttacaaatttatactcttttaatctctgactaaagttttacatcgctatcagtattatgtatgatttattttaacaactataaataagcttgaattttgtaactagtaagtgtataacagtaatgaatacgaatattagatattcaataaacttaaaaggggcgtcattatttttgagactaggagctcggatttttaaaactggtatagccattattttagctatgtctatcgcttctttactaccggatgatgttggtctgaaagccttagctggtgtcagtgctgttgttgcaatgcaacctagtatttatcgttcatttaaaacagtttctgatcaggcattaggtaacattataggtgccatactttctgttacaatggtaacaatttttagtgataattttatcattatgggtgttaccgtcatagtacttattgctattttatttaaatttaatttagcacatgttgctactttggcgagtgtaacagcattaatcattatgggacaacataccggttctttctatattaccgccttttacaggtttgtacttgtaatgattggtgtcataagttcatctctagttaactttgtgtttctaccacctaaatttgaaacaaaaatttactataattcattaaatatatcctcagatatttttatgtggtttaaattagtattaaatgatacgacggagtttaataatattaaacaagatagtcataatttaaaacaacgtgtcgaaaagttagagaaaatttatgattactatagcgaagaacgtcctattacaaaaaaacatattcaccaacagaatagaaagaaaatacttttcagagaagtagttcagacgactagacaagcttatgaagtattaaacaaattgtcgcgttatcaaaacgacttatatttacttaataacaatttcctattacaaatcaaattagatttagattcattaactgcttttcacgagcaaattttagctagcctttctaaaaaagcacgttataatgtgacacatgttgattatgagttagataatccgcagaaaaaagatttattgtctacatttcagcatgagttaataaatcatccttatcaaacggaatattcgtttgccaatgttatgcaaattgttgcagccatcgaagagtatcgacaccatttagagcatttagaccgcataagaattagctttttcacatatcatagatctgatgcagacattgaaattgttgaagaagactttgatttataacattaaaaaaattcctataattaattccacaatgagataaagtaatattgaatctcgaaattaaatttaaaaaagcagtaagattattttcaattaagaaaatctcttactgctttttcttatgttatgaccccaccatcctgttacaaattttctcttcaggattgtactgaagtcaaacaactaatactttataagttttgaatgctatataaatgctcgtaagcaccttgttttgcaatcaattcacgatgcgtacctgtttcaacaatatgtccattttcaattacgacaattttgtcagcatgtgtaatagtggacaagcgatgcgctacgataagtgtcgttcgatctttactcaacacatctaatgcttcttgaataatggattcactttctaaatcaagtgcacttgttgcttcatccaagataagaattggcggattatttaaaaatattctagcaatcgataatctttgtttttgaccacctgataatttaacacctcgttcacctacttcagtgtcatatccctgtggcaagttcataataaagtcatgtgcattagccattttcgccgcttcaactacttcttcatctgttgctgttggacgaccaagtaaaatattttccttaactgtatcagagaataaaatattatcctgttgcaccaatcctatttgatttcttaaacttcccgttaaaaaatctttaatgttgtgaccatctattaaaatttgcccagaagttacatcgtaaaatctcggtattaagttaattaatgttgatttaccaccaccactcatacctacgaaagcaactgtttctcctttttcaatactcaaattaatatcttttaaaattggagcttcgttatcgttatattgaaaactaacatgatcaatatcaatacgaccttgtttaatttcaataggttgagcaccaacaccatttttgatgtcataatcttcatcaattaattggaatacacggtccattgaagcaaaactttgcgttaaagttgtaaatgatgcgactaaacgacgtaaaggcccgaacaataactccaagtatccaacaaatgctgcaagtgtacctactgtgattgatccagaaatagcaagatatgcaccaacaccgatgacaattattggtccaatatctgtaactgtattaattgcggcaaaggaataggcattccatcttgtatgtttcaaagcacgtgttaagaaattagtgttctttttatcaaagtttttcgcttcattgtcttcaatcgcaaaacttttaacgactgaaataccttgaacacgttcatgcaagaatccttgaacctcagctaatgcttgcgatctttcacgcgtcaattttcttaatcttccaaagaaaacgtacaccgttaaaatgtaaaatgggaagataaacagtgctgctaaagtcaatttcacatctaaaaagaacattatggatagtgcaataataattgttatacaatctaaccaaatattcattaacccggttaaaatgaaatcttttgtttgttcaacatcattaatcactctagatattacttgacctacttgattattagcataaaatctcgcacttaaagcttgtaaatggttgtataactttttacgtatatcatacaatattttattacttgtccattgcgccaaatattgacgtataaattcaattggtggtctcactattacaaaaataaataatgcgataccaatggcaatagttaaatgatgaactttttcatcagtcgttagtgcgtggttattaatcacgccatctattgcatatttaattaaaagtggtataagcattggtataccaaacttaattatcccaacaataatcgttgcaaaaatacgatatttgtatggcttaacaaattgcaaatatcgtttaatcatacaatcccccctaatctattgccctatcctattcataagcataaaaatgaatagaggttggatacataatttgtagatgtaaattcttcttacaatttacatttttaaaattaagatatctcaacctctgtcatattcatgtgattaaatacgttgtcttattcgtatgttatattctattcaatttaatctatggatactgtgtccccacacgacagcaaaagttatcatacttctttacaacactaagtcaatataaatgatttaatcagtatttacactttatttgcttaatactgtctaatttttttgtaacgttcattccaaactttgataaaatctggcgcgaatgggcccttcttctgttctatccattgttgaagaatgtccacgttgcgtcttaaaataatatcaatatcatgcggataattcatttgattcatatgttgttcatattcatcttcatctaataaatgatactttccgtttggatatactttaatatctaaatcatagtctatatattttaatgcctcttcatcacaaacaaatggtgatgacaaattgcaatagtaataaattccatcttctctaaacatgcagataacattaaaccaatattctgagtgaaagtaaacaattgccggttcacgtgttatccaagttcttccgtcactttcagttactaacgtatgatcattgccaccaatgacaacatgatcagtaccctttaatattgttgtttcagaccaaacgcgatgaatcttaccatcatgtttataactctgaattttaatgttttccccttctttaggtatggattctctgaccatactccacaccaccttctgttaatttaaccattataaattatagcatatttcagaaatagtattatataaatacatatttttacgaaataagattttactacttaataattaaactcggtaatattgctaagtactacaacagagatttacatgtcccatttaaagtatataaaataatcacttttatatatcaacactttaactttttgacattgttattctatgagatttaaagatatcatttatactttttaaaattaatgtcactatgttttccgataatattaccaatcatcgaatgttacccatttataaattgataaatctttgacataggtacagggaatgtatattgatctcgatcacttaaatcaaaccaaatcatgtcatctggtaatgtttcaatgttaattgctcctgaaacggcgtatactttaatcttccatgttaaatgagtaaattgatgcttcaactcaaaaataggtgtttctactggttgaatgtcatgaccgattttttcagtcattttacgtctagcatgctcactttcaaacataggaaattgccacataccatgcaataatttttctctacgcttttgcaacagatattgaccttgattatttctaattaaaaagacggattgctcaattacttttttacttacatttttagatttaacaggtaacttttcaaatgtacctttatcaaatgcctcacagttttcttgaactggacaaaataagcataatggattttttggtgtacaaattaatgcccctaattccatcatagcttgattaaacgttccagcttctgtagtaacatacggtaacaattcttgttcgtacgatttcctcgtcgattgtaatttaatatctcgatagtcatcattcaatctagaccatactcgaaaaacatttccgtctacagttgctagtggtacattatatgcaatgctcattactgcagcttgtgtgtatgggccaacaccttttaacgctttaaattgatcaggatctttgggaactaagccttcatatttatcataaacttctttaatcgccgtatgaaaatttcgagctctactataatatcctaagccttcccaatactttaacacttcatcttccgaagcttgactcaaaacttccacagttggaaatcgttcaacaaaacgatgataatagtcaataactgttttaacttgtgtctgttgtaacatgacctcacttaaccaaatatagtacggattggtcgtttgtcgccatggcatttctctttgattttcatcaaaccagtgtatcaaattttctttaaaactagactgctgatacatttataaaaccctttcctcaccaaaattaattgtctttactcataatgtttttattgtacattaaaatcatggttagtatgtaagttaatttagttatttgcgaaattggattataatagtatatataatattatgaaatgagtgaactgatatggacactgcaacacatatcgcaattggggtgggccttacagcacttgcaactcaagatccagcaatggcttctacgtttggtgcaacagctacaacccttatcgttggttcattaattcctgatggggatactgttcttaaattaaaggacaatgcaacatatatttcgcatcatagaggtatcacgcattccatccctttcacaatactatggccaattttaattacatttttaatattcacgttctttagtggaaccaacccatttcatgtatggatgtgggctcagctcgcagtatttttacatgtctttgtagatatattcaattcttatggtacacaagcgcttagacctatcacaaacaaatggattcaattaagtgtgattaacacatttgaccctattattttcacagttctttgtattggtattgtattatgggttataggcttgcatccatttgcagtcttctttcctataatcgctttactaatcatttattacatgattcgttttaaaatgagagccgtaattaagcaacaagctttaaaagcaattcaacaagagcatcaccctgttaaagtatttgttgcgccaacaataaaatttatggaatggcgtgtcgcgatacaaactgatgcacatgactatgttggaaaagcatatggtaggaatgtggtgtttagtgataaagtggaacgtcaaacattatcaacagactccattttatggaaagtcaaaggtaataaagatatacgtacttttttaaacttttcatcaatctatcgttggcaaacaacaacgttagcagatggttctactgaaattcgtttgattgatttgcgttatttaaaaaatgatcattattcatttgtggcaattgcacatgtaacaaacgataatgtcatagaccactcttatattggctgggtatttacagaagataagttacaacgtaaactgtatgctaaataatttcaagttattattcactaaagttaatctataaaaaatgaacaaccgggcagaatgaaaatcaaaacgatttttactctgtccggttttttaatgtaaaactatgaatgcttttacaaaatctaaaatttatattgttgctaacaaactacctttaatgactcgaaatatcaaaatcagtataggaaaacaatatctagatgatattctaattgtttctgattctcacagattaatttacacaacaggtcagctaaacatcatgaagaagtatccgcctcgtctgtactatcatttgaaacatcctgttgattatcagtttgtgtcactttagatgttttattataaattgcgtgtgtcgtataccttgctaatacgaaatttactgcagctattaaacataagaataaaataaagtaaaaatgatatggaatgttttccatacttgatataccaaatatgatagattgtgctataccattaacaatgtaatacattggatttagcattaggatgtgattgataaatacatgatttggatttggtatgaaaataattggtaacaataagaaacacaatacacaaaccccataaaatatgatatttattttttcagttaacagtcgaataagaccaaaagtaacggatattaatcctacaaaaatagttgccatcacaataaaatagaatagcgctatatatgatgtttcgaagtttactggtttaaccaatgcactaatcatcgtcaaaatgactagcataataaaacttaaaatagacataataactactggcgtcgctgcggaaatattaaataacttagtaactaaaaagtcattcatataatgatgataagagatataaattgtgaacatcactaccgcaaaaacaatcaatacaatgattctaaataaccatctcacctctttaacatcggtcaaatgactaaaggaaaatagcgtttcacttgcaataataagtattaaacatgcagctaatacgattagaaaacttttccaactttgttttaaacgttctgttacataccttttagtatgcggtaagtttttaaaatataaaataatattatctagcatctttacacctacaattcaatataaatccatttgtcttctttcaaattggcaatacaatatccattcccaactttagtaatccaaatgttattgttaatattaaacttatcttttaattcttttttatctacaattggataaacaaaaccgtataactgattattatcattgaaaagtaattgtatcggttgttgtgtaacggatgcaacgaaacggttatcatcatcaggaactaaagtttttataactgaactatgctttttatgtaattgactattaaagtatgcatagtaattactataatttgatttcatatatggtgctaattttttaaaactatgcgtttgatataaacctgccgggttaaaatattctaatttatctttactaacatagtaagtcttattatcggcggtaacacgataatttttactattttcgccagtaattgtaactacactatattttggaattgtgacttgtttatccccttgcatatccacactgccattaaaagcaattccataagctaacttttcgccatatggatctttattttcattttgcatcgtagcacgattcgtaaaatctgttatcgaaataattcctatattattgaaaatgagcaacatcatcaatgctaagcctaaaatagtacctgaggctaaagtccaaaaacgcactaaaaacttaggcggttttgcatgattatagcgctcaacacgtttgaaattataggtcatctctggtattcttgtacgattctttttccaatctaaatcaaagttttcaatttcttcttttgagtttagacttaatcgatcacgttcatgttctttaaaagatggaataacttgtttaagtgacccttccattcttaattgaccatgtgaaaaccaagctatgtagttactcacttgtgaaattttatcaatatcatcaccaattgacacaatcgttaaattattttcaatataatcatttgttaattcaatcgcacgttccataaattgtggtgttaaatagtcaataacatgatttaaaataataatatttgattttgatgagcgtgcaatacttaatagtaattgagcgtatgccgctttcgaaatatggttaaccggcttcgttttataatcacctaaatgtgcatattgaataatctgttcagctttatgatcattaatttcatatggaaatagttgaactaactgcgctgtataagcttcaacagtttgatgaattaacgattgatcttcaatatatccgtagaacaaatcttcagtacaaactactttacctttatcaggtttaattgcacctgccaacaattgacctaccaacgctttggaagattcaggttcaccaattatacctaatgcttctccttgataaatatgtaaactaatattgtttaaatcgatatcttcagcatcatatccaaaaggtaaataccatttcttattctgtttattcctatagtagtgtgttacttttagtaactttaaaacaattgaacttcccatctattttcatccttctataattgtaataacgctataggtaatccttcttcgggttcatcgctattaaatctaaacccccacgcaaaaataccttttaatctttctactttaaaatattgattactgccatcagtcagtttataaattttaccaatttctatcttttttctgtctactaagtaactttcggcaacaattactttactttgataaacgtcatattcatttaaaataccattcatctcagcttttctcattttctctttataaagttgtatttcgtgtcttaattctggctcagacatctcactcaatttcttctgttccatcggcaataccactttcttctaatttagctttaattttatcatatttatatccttttctcataaggccttcgatagtttttgaaattaatttctgttgcgtgtacttctttcgatttttattataaattttttctaaatctcgttgtaataaatcgtctaaaaccgcttcatcttgtgtaaaatccatttcattcaatacagcatgaatggtttccatttcaaaccctttttgaattaaagattgcattactttttctttaactttattttgtggccctttttttgttttagatattttttcagcaatttggataatatcatcaagttcctgttgttctctataaagttctgtaaatatttcaatgatatttggttctataccaagttgatatagtttttgttgataaattttaggtcctttatctgtcgtgcgaatcattgtattttttaaactttccgcataatcttgatggtcgattaacttttcgcgataacaatattcaatcacttcagaaatcgcttgctctgatatctcttctttttgtaaatattgtataacttctttttcagttctctttttatatgataaatattggattgctttgtttaaacctatgcgataatgatcatacttttgaatctctgccatgtcagcagcttcaagttgttgccctttttttaaattaaatttgactaatgtatcgatatctatacccatttcaaattgttcgtctaaaaaaagattaaaacgttctttgtttttcttttgaacttctattttagtaatcttcggcactggatcaccccgttactttctcaagttttaatacaatactcttttattattcaataagccacttcctatagcaaatgtttaactttaaatatttttcgatgctaacaaaaaatcacactatcatcttttaaaatgaaagtgtgattacaagcaaatctgtaaaatttataaagcagaaacaattcaactttatcattatgacatttcaattaaaccttctacattatagttccaagcatcttacacatgaatgcaagtatttaacgatttaattgtgacatagcctgttgatattgtgtttcattgatataattttgttgcttcattttttctaagttcgtgcttacacgttgcgtaaaattctctgacatattattgatattatatacgctaggtgcattgactttactagctaaaatagcgctttgtaaaactgttatgtgagacattgttgtactatttttattcacggttgttccaaagtaatggtttgctgcgccctcaagcgtatattgattatccccaaagtaaatattatttaaataaaagcttaaaatttcgttcttattatattgtttttcaactcgatgagctacaaataattcttttacttttctagtaaatgaacgatcattatcataaaaataatttttgacaacttgttgtgtaatggtactaccaccttgcacatctctgtcgctaatcgttgaaaataaagctctagttgtacctttcaaatcgaatccatgatgattgtagaatcgttcatcttccattgaaataaaggcacctttaacatactctggcatgttatcagctgacacaaaactacttttattttcaatttttcttagttcatccacattatcgcgtgtagataaaaaatacatgataccaataaacaatgcgataatgattagaatggttaataatatttttaatagtattcgtttactttttttctttttcggcggtttgccaactggttgataatacgtattatagtgaggttcgtgtttcatatgctcaaaatgttcatttgagtttgagtacctatcgcttcttttcatgcgtttgctccttcttttaaaactcacttagtatataccttgagtttaccagtactatcacaaataggctacactttttgggaaaatcagtccaagggcttacaatcgtatacgccatcatacttactttttgttttttgaaaagattatagataaatcattgcgattttaaatattaatcatgtcaaatattgttatattttataaaaataaaagaccatccctattaaatgccaatagagacgaccttttatttgttattcattttttaaaactaaaatccatatttcatttcaaacgaaaatatataaattttaacaattgataaccgcaatactctattgtaattgcttaacgatttctcgattaaaatcatctaaatcgtctggtactcgacttgttacaatattgttgtctacaactactgactcatcaactacatgtgcgcctgcatttgataaatctttgcgtacatttaatactgctgttaacgtacgaccttttaaatcgtctgtatctattagtatttgtggcccatgacaaatggcaaatgttggtacatcatttttagtaaagtatttagcaaatgtgccatatcgaccttctgtatctccacgtaaatgatctggtgaaaatcctccaggaattaataatgcatcataatcttctggtttagcttctgcaatgcctacatcgacagtaactttttcaccgtgtttaccaacaacttcactatttgcagtatctccaatcactacagtattaaagcctgcattctctaatgcctctttagggcttgaatattctatatcttcaaattcgtttgctagaataattgctacttttttagtcattgaaaatcacctttctatatatcattgatataattactatagacaagtaaatcagtgattaaacatacaagatataaaaattattaagcgactgtcgcgatatctaaccctaacacatcttatgtggcatttacttagatactaatttaaccttttcttcaagctgatctaacaatccaatccattcatctatatcttcaacacgtacttcatcaggatttacatgatcgatatcctcaataaacttatttaaacgcgcttttatctgttcgattgtttgctgttcattcataaaaagttaactccttttattttgttttctttttcattattatcctaacagaaattgcgttaaagcgatataatcttagctatatttatgacattcaaattattttgacttttaaaaatccccttttcaattaactaaaattaagagataatttgttacgagtgataatacgaagtggtatcataccgatatgaaccaaatagaaagaaggaagtttaagacgatgaatagcgtcaaattgaagcaacctgttagcatttacaatgatccatgggaatcatataacgatgttaaagaacatggccaattaactttaagtaacatcgaatttacaactacaaatctttgtaatatgcgttgtagccactgtgcagttggttatactttacaaactgtcgaccccgagcctttagatatggacttaatttatcgtagacttgatgaaattccaaatctgcgaacgatgtcaattacaggtggcgaaccaatgttttctaaaaagtctattagaaatgttgttaaacctctattaaagtatgcacatcatcgaggtatatatacacaaatgaattcaaacctaacattgcctcaagatcgttatttagatattgctgaatatatcgatgttatgcatatctcacataactggggaacaactgatgaattcgcaaatgttggctttggcgcaatgaagaagcaaccaccgttaaaagctaagttaaaattatatgaacaaatgatttcgaatgcacgtacattatcagaacaaggaatgtttgtatctgcggaaacaatgctcaatcaaagtacgctaccacatttacgaaaaatacatcaagaagtcgttcatgatatgaaatgtagcagacacgagattcaccctatgtatccagctgactttgcaagtcaattaaatgtgttaactctagcggaaatgaaaaagacaattcatgatatattggatttcagagatgaagatatttggatgttatttggtactttgcctgtgtttccatgcttaaaagatgatgaagatcaaaagttactatcacgtttaagaactgctaaaaatgtaacgactagaaatgacccggatggccgtagtcgtttaaatgtcaatgtatttacaggtaatgtaatcgtaactgatttcggagatgaaacaggtacaatttcgaatatacaaaaagataaattaacagatgtatttgataaatggttatcctctgatcttgctaaatcattaaattgtcattgttccgagtttagttgtttaggaccaaatgttcttgttaaaaatatgtactatccgaatatggattttaaagataatgagcgtcatatgcacaaacaaccacaaattatacaattttaaaaactcttaattatgcggagaagcactttatcgataagtagtctccgcatattttaatgctattataaaataaaaaacaattaattgctggcagtactctactttaataataaaggtcatttaataggactaatagtctataataaaagggttaaattttaactaaaagcataaacgtgcataatcaaaaagacagattgtaggtggaatattcgaacataacagttcaattcatccttaacaatctgtctttatatttttagtctctaatatgttgcacttgagctaaatattcaattgtttgtttactttcaatgcgacgtgcttttcttcgttcaacacgttgtggtgctgtatcataaaaccatttttcaacatcatcttctggatatacaccaggtacatgtttaggtttgccttcatcatctaacgcaacaaatgttaggtaacttaatgcagctaaatcatgcttgttattaaatacatcgtcaattctaatttgaacgaccacttccattgaactagtcccagcgtatgaaaccatcgctacgtattgtaatatgtcccctgttttaatcggctttaagaaatctactgagtctgtagatgcggtaactacttgcgcaccagcatgtttcatagctgtgattgctgcaatttcatcaatattagccatcaatgtaccaccaaacattgtatgatggtgattcgtatcttgagggaaaacttgtctatttttataacattttgattctgacatagatttcattggtctgtcctgatttgtcattattttatctcccaatctatactttaatcacgtatttgacctttaaatacatgtttcatttcctactcagcacctcaaaatacatttattaaaatgttgatgcccaatttccattttcaaatactagttcttttgaaccatcttcgaatatgccataaatagtcaaatcactactaccaatcatgaaatcgacatgtacgtttgaatcatttaatccgcttgcaatcttttcctcaacagtcatttccgttccaccttgaatattaaaggcgtaagcagatccaatcgctaaatgacatgctgcattttcatcaaataaagtattgtaaaaaatggtattacgatttgatatcggtgaatcatcaggtactaatgctacttcacctaatcttcttgaaccttcatcagtattgattaaatctttcaataccgcttcacctttttcagctgaaaaatcaataatctctccatctttaaacatcaatttaaattgatcgataattgtgccattataacttaaaggcaatttattagtaacatatccatctactctatttcgatctggtgctgtaaatacttcttcagttggtatattagcaataaaagcttgttccttgccgttaacataacttgtagcatcttcccagatatgatttttcgctaaacctactgttaaatcagtaccttcagatacataatgcaacgcatggtaatttttttgttgtaacttttgagcgtaaacacttaaattagcgatgtgttgacgccaattttcaactggatcgttaccatcaattcgcacaatatcgaatacctcgtcaataaacttaatatatgcttcttccacagatagttcaggatacacactcttcgcccaagctttagatggaaaagcagctacgacccatggaaattgatttttttgtacactttccatatatcctttaaatgcgcgtgcgttttgttgttgaaatgcttgtaatttttggctatcgataccatccattaaatcaggatcttcactaataagtgctaaattagcagcgccacgtttaacgtaatccattctcgcttcaacatcatatgattttatctcatgattagcaaaatgttccacagattcattttcaaattttaagcgttttaaggttggatcgctatatacaacacgtacatctgaagcgccacaatgatatgcttcttctacaattaaatgcgttaattctaatgtttctactgatgatctaataaatactggctgttttggttgaacattcataccaaccttaactaatagttcagcgtattgttgtaacttttctttgtaattagtcaaaattcccactcctagtcgtgtcgcaattgtcctaaagcgtcagcaatagctgtcacttcacttggcgacaatctttctcttgattgaacaaaatcatatatatctgttaattcttcttcatttgcatttttatatttttcaggatctaataatccttgattaacaatatttaacttctctctaatagctaatactttctcttcatttgtcatagccacaatgttcacctctaataatagttatgttatcaaagtatcacaatttaataaactttaatagaattttatataatctgctttcttattgtttaaagtcgctataaaatggggatataactacatagtttggaggaatcaaaatggtagatgtagcatttgtctgtcttggcaatatatgtcgttctccaatggcagaagcaatcatgcgacaaagacttaaagacagaaatattcatgatattaaagtacattcaagaggtactggtagctggaatttaggagagccacctcatgaaggtacacaaaaaattctcaacaaacacaatattccatttgatggcatgattagtgaattattcgaagcgacagatgattttgattacattgtggctatggatcaaagtaacgttgataatattaaatctatcaatcctaatcttaagggacaattgttcaaactgttagaatttagtaatatggaagagagtgatgtaccagatccatactacacgaataattttgaaggtgtatacgacatggtattatcatcttgtgataatttaatagactacatcgtaaaagatgcaaatttgaaagaggggtagttttttatggaaaataaatttgttcctggtattttaattggtgccgtaattggtggtgcaattagtttagctgataaatctacacgtcaagctttagttcaatcagttaaagatgcaaaaaatggtaaccgcactcgtaagccttctaaagtcagcaagattaaagacgaagttttatactggaaagatgttgttgaagaaattcgtcgtaataatcctgaattagaacgttcattaaaagatgcgaaagaaacatttgttaatagaaaaaatcaacgctaagatgattttgtttttataaggcaatacttaacaatttggtgtacgcctttcatagttatcattattaaatgataatacaatgattggccaaactgcattgtttcagtattgcctttgttttaattttaaatcaaaatagcctatgaaagatttaaatcaattaatttctataatattatcatttttaaagcatatcattgtttagtttttttataattggataaatactaatagttactttataaaacattacatagagaaaggttaaggagtgcacatgtcgaaaaaggatcactcttcttcaaaatatcttaattctgttaaggaagcacaagaggagtcaaaaaataaaagtaatcccaaaattgatgttgatcgtacatatattgaacctcaacaattccaatctaagaaacctaaaaaagatgatcaggttttcttcttatcaagattaaataaacctgcaaaatataagaaagactctaatttcttatcatatctcatctatcgcataggaaaagatgatgcctcaggactagcagcacaaatgacttaccatttcgtacttgctatgttccctatgttgcttttcctattaacattattaccatttttcaatattaagcagagtcaaattactaatatgttaagcaatgcacccgctgaaacatctactctaattaagagtgtaattggtgatataactcaaaactccagtggtggcttattatctatcggtttgattttagcaatttggtcagcttcaaatggaatgactgcaattatgaattctttcaatgttgcttacgatgtagaagatagccgtaatggaatcgtattaaaactactaagtgttgtcttcactgtagttatgggcgttgtgtttgtagttgctctagcattaccaacgcttggttctgtaattagtcatttcctattcggtccacttggatttgacgaacaagtgaaatggatttttaaccttattagaattgtgttaccaatcattattatatttatcgtatttatcgtgttatattcggttgcacctaacgttaaaacgaagcttaagtcagtattaccaggtgcagtatttacttcaattatttggttagctggttcatttggttttggttggtatatttcaaattttggtaactattctaaaacatatggcagtatcgcgggtatcatcattttgttactatggttatatatcacaagttttattataattgtcggtgctgaaatcaatgcaatcattcatcagcgtagtgtaattaaaggtaaaacacctgaagaagcagcattagaacatgatgacaataataaaaatcattataatgagaacactagatacgaatatgatgaagatagtaatgcaacacatcaacgtacgtaccatgttgatgaacatcctagtgatacctatccagaagatgataaaaatataaaagacaaaatcgttgataagcttaaaaaagactaaacaccaacaaaacagaggttttcgctaatgattgcgaagacctctgtttttggtgtctatttgatgttatattgtgattggcgtaagtaacttttcttaattcaatacgaactattgaattaaattatgttggaatgcatagatgacagcttgtgttctatcttgcacttctaacttacttaaaatgttactcacatgtgtcttaaccgttttaatagtaatatgcgatgcactagcaatttcttgatttgagtaacctttcgcaatcaataataatatttccatttctcgttctgtaagcatttcatataactctgcgcgctttttcatacggttacgcattttcactaaaacttccggttcaaaaacagattctcctctagaagttttacgaactgcatcggcgatatcttttgcacttgttgtttttaaaatgtaactatcgacacctgcatctaatgcacgatatacctctttatcttcaataaaactagttaacattaatactttaatttgcggtaaatcttttttaatctgagtcgtcgcttctacaccatccatgtcttccataagtaaatccattaaaattaaatctggcttcaactcatgggctttggcaattgcttccttaccagaagcgccttcaccaactacttcaatatcactttgcgttgatagataacttgaaattcctatacgtaccatttcatgatcatccacaaacaatactttaatcgtcatacgaatcctccttatttaaaggtgctttcacctcgatacgtgtacctgaatctggcaatgatacaatatggaacgttgcaccaatttccaaagctctttcacgcatatttttaagtccataactttgttctaatttttcatcaacattaaaacctttaccattgtcttgaattctcaacaataaataatcgtctttattaaacaattctactgtcacttttgtaccgtttgaatgacgcaatgtattcgaaattgcttcctgtgtaattctgaacaaatgatcttcaatacctttaggcactttaaaatcttgtatttcatgcacaactttcatcggcacttttttttgtaaatcaataactaaatctttaataccctcacctaaagatttgtcttttaaaccaagcggtcttaaatgtaacagcaaagcacgcatttctaactgcgaatcttgaaccattttctctaaaatcggaatttgttggtctaatggtggttctaacttcgtttctttgatagcagaaagcatcatacttgccgcaaaaagttgctgactaacagaatcgtgaagttctcgagctagtctttgacgttcatcttcaataatctttttaactttcacatcattaatattataattttcattggttaaattttgagttttaagtcgcaacttatgcaattcttgatttaaaggtacgagtgtatggtataaatctaacgtttcactatatatttctatattttgatcattaatgccaactgtttcgccttccattgaacgctcaatttgcgtcttaatccaatcattttgctgattgattttgtatgcgagtaccgaaccaacaataatacacaataatatgatgatgagatttaaaaataaaaagactggtattccgaatatttgtgtataaaacataccttgaaaatagatgatatttacaaaaactttatcgatgaatagaaatgcagctagcatgctatatactaagatgagcattgaaccaattgttctaatgtagtggttcatcgataaatcacctctacgtctccgataaacgttgatacgtagatattaactgtatagttatccggtttcatcatttcttcaatatgaatattgttattttcaactttatatgatttttcattcacgtaagtacttccataaaaagcagctacatgtaaattaatattgtaattaaccggcaatataacctgcactttacctaaaatgtgtctaacaacaatggtattattttccttaatatttgcagcttttgttaagtcaatatgtaggtcgccaattccatgttgaatttggacatcttcccatttatatacataaactggtgtacgttgctcaccaaaccacttttgtttaataaaagatggtgaagtcataacctcatccgtcgcaactactttttttggtttaaatttgtgtattaaataacgcacaataagtagtaataaaaagacgaacaagatgatgattgtatacttattagacaataatgtgaatgcaattaatagcgcgcctatccaaaacgccaaaaggccacgtattttatgaaaataaagatatcctacataaactaatacacatcccaataatagaacgagtaaaaagccaattttttcaaaaaatatgtagtaaaaattggcaataatcattaatgcagtaaaaatgatcaacatttgcgttgatatatatttgtgtgtcatgtttcgccgcctttctatgccacagcgttcatataatttattagatacgatgttttttctgttgctattttttcagttgaagtttgttgaatttgagtttcaatttgtgcataatatgcttcaactttattcaactctgatttaatattttcaatttcttgattattgatttctcttgcacattgaatttgaaatgcttcagcaatatcaatatatttattttctaatgttagcattagactgtcaattaacttgctaagttgttcttttttagtaattaaataacgcatataatcatctaaatttttcattttttcatctagcattaaaaggtagtgcttgatattatttcttactgttgctctcaaaaactgttcaatataacgttcaacatagttcataactatcaccttttataataagttttaaaataccaaatgcgctatgtatcttcgttgatgtcgatgatatgtttgcttaaaaactactttagtacaacatatttttgaaatgacgcattgattgtgttcttaattattataaaacagttccgaaaccaatatgaataggctccggaactaaatgatgttcatactttagtcttagtatatgttgaactattcttcttcaatttttgtcgttaaaatcggaccatccttagtcacgataaccgtatgctcaatttgagcaacaaaacttttatcgctcgtttcaaaagcccattcatttttaccttctgtaacaaatgatgcatttgatgagataaacggttcaatagctaataccataccttcagttaataatgttttgtcttttggatcaaagtaattaagtacatgtgctggtgcttcatgtaatgataaaccaacaccatgacctgttaagtttttaatgactttcaaatcattttgtctagctgtattatgcaccgctttaccaatgttacttaacttagtacccggttttacttttgcaattgcattctcaaatgccatcgttgctacgtcacatactttttgtttcattggatcatctgattctccaacgacaaatgaaatgcctgtatctgcataatagccattcttcaaagccgatacatcaatatttactaaatctccttcacgaatgacacgcttacttggaatcccatgtgccacctcttcattgacactaatacacgtttgaccaggaaaattttcatcatgaattggcgcagaaatagcaccgtattcttcaaataactctttcgcaatattatcaagctctttcgtagtgatacctggtttggttgcagcttgcattgtattgcgcactttagcgcatatgtatccaatttcttttaacgcttgtaattcttcttctgtttttacaatcattttatcccgttccttttttatataattataacttattatagcaaaaattctttgatatactaaagatgttactttagtattttggaaagtgagtgagacatagtgtgataaagaaaaaatatttctttatcgttgtaccccaacttgcattgcctgtagaaattgtagatccaatttctctatgttggggccccgccaacctgcacattatcgtaagctgacttttcgtcagcttctgtgttggggcccacaccccaacttgcattgcctgtagaatttcttttttgaaattctctatgttggggccccggactataattgaaaaatgcttgttacaagtgcattttatttcagtcaactactaacaatataacattgtggagcccagaactttgattaatgtatatgaaaatcaaagtaatgcttaagtatgattatttcaaatattttacatacatgaacttttccaatgtacgatactattattataaagcgctcgctaagattttacgatgattagaggttaaaaaatgaacgatcaatggtataaacatttaattggtgccagaacaattaaaactggtattgccatttttttaacagctgtcttttgtatggcactagatttaacacccatctatgccattttaacagctgtagtcacaattgaaccaactgccaaggcatcacttattaaaggttatcgtagattacctgctacggtaattggtgcaggctttgcagtattatttacatatttattcggcgatcaatcaccttttacatatgcattgagtgcaacgttcacgattttattctgtacaaaactcaaattgcaagttggtacgaatgtcgctgtactaacatcattagctatgattccaggtattcatgatgcctacatattcaactttttgtctcgaacattgacagcaattattggactcgtgacatcaggtttaattaacttcatggtgtttccacctaagtattatggtcaggtcgaagaaaaattaagtaagacagatgccttgatgtataaattattttacaatcgctgccaagaacttatcttatcaagactgcaatctgataaaagcgaaaaagcatataaaaatattttcaatttaaacaatcaagttgaaacgttaataagttatcaacgtgatgaattaagctatcataagaaaaaagaatgtgattggaaattactcaatcaattaactaaacgtgcatatacgaatcgtttgtttatcactcatttatcaaatatcatttacttacctaaaaatactcgtgttaacttttcaggtgacgaaaaaatggcattgctaaaaattagtagtagcatcaaagatatattttatgatggttcttttaagagagaagatgattctgtagaaactttacgttcgacaataaaagcacttgaaattagtggtgaaaatcaaattaaaagtcatatactatacgaagttctaatgatttatcgactgctagacagcagatatgcttaatttaagtaccttatactaattggcaccatgggagtgggacagaaatgatattttcgtaaaatttatttcgtcgtcccaccccaactcgcattgcctgtagaatttcttttcgaaattctctgtgttggggcccacaccccaacttgcattgtctgtagaaattgggaatccaatttctctttgttggggcccacaccccaacttgcattgtctgtagaaattgggaatccaatttctctttgttggggcccctgactagaattgaaaaaagcttgttacaagcgcattttcgttcagtcaactactgccaatataacttcgtagagcatagaacattgatttatgtccccgcctctttttatcgtatatagcatgtccctttttaaaattacaagcataaatattcagactcaaatatagccacacccctaaactacggagggatgtggctgtcttttttgattgtaattatgtatcagatttaaatcattaatgtaaagaggctaattcattaataaatttagtaaaatctgatttagcaacatttatccttaatgaaataccagattctgttgccatgtttgaatgccttaaaccagaatcaaaatcaatataaatacaaagcagttcttgattaaaatcaataattgtaaaatgtaaatcaggttctataaaatatatttcagtaacaggattgtcgtaatccatatgtttcaaattgtccatgtcactatcaaaaagtgcaaattcaaatttaacttcttgatcttcgaaagttgcactagtgtcgaaataataaattttattatcttcttcgataactacatcttttaaaataaatgttatcgatgttttgctatgtaaataagatgcatcttttaatatcaatttagtaggcttcatcgtcaaattcctttcatcattcattttttcatgttgcataatcaccattactattgataattctaggatagatactcattgtataataattattcactagaacaaaaaaaacacacatcaatttggttgtttccatccaaaataatgtgtgtgtttatacatatatgattaattactaaacttcatcgtttatcaatattaaatccattgatgcgatgttcagagttaacgagatttcttctgtctatttgctctgtctattaatacttgtttcgcttgtatttccgcttcattatctatttctttaggctcaaacggaatacccttacgttcacaagctttttctaacagataatcagtgatttcgtaatttttaggtaaaattggtccgtgtaaataagtacctaataaatttttataatgaatgccttcttttttatcttcatcattattaccataaccaaaagtgacatgaccaagtgtaccgaaatcatgatatgttctaccaccgtgattttcaaaacctacaatagttccaaaagtatcactttcgataacaatatctcctgttaatcggtttgtctttgattcagtataaaaatctaaaatacctaacccttctaattctgtaccatcaggcgtgatatatttttttcctaaaaattgatagcctccacaaattgttaatcccggcataccatcttcaatcgcttctttaagtggtgtcttaattttacttaattcttttgttgctaatgcttgttctctatcacttccaccaccgataaagaaaatatcacattcatcaaaggtaataccttctgtttcattgatttctacgacattaactttaatatttcgttttttagcacgttgtcttaaagcaataatatttcctatatcactgtataaattcaatttatctgacataaaatgataaatagtcaattcatgcatattatgattgacctccttcaaacgaacggtttaattgttcaagcataggcgctaatgatgtatagtttggtattgcaactgtgaaacctttataatccatagtctttgccgttgctttataaatatcacgctcaactataattggtacttcaacctctgctaacttcaatcgcaattgaagttcttctgctcgtgtacctgtcacgatgatagcttcaatttgttgcttagataatttttcaaaatctgcatcataaatccatgaagtatctcgaccatctgcagcgttatcatttagcgaaataacatacactttttcgccttctaattgttcaccaactgataaacttgcattcattcctgcaggatttttagctaaattgatcatcgcttcttttcgttcttttttaaagtactgcatacgaccattgtctgatgtatacgtttcaaagccatttttaattgcttgttcatttaaccctagctctcttaaaacagtatatgctgctaacgcgttataagcgttaaagtcacctgcaattttcatatcatatttttcatcattgatatttaaatgtaaaaacggtgccacatcaaaacttgatatttcatattttgcttgctctcgtttgaaaccacactgacagtgataatgaccaatttgattataatgaatataatcgtattgcaataagcgaccacagtttggacaatatctactttcattcatcgtactttgttcaaattcatgggcatgtgctttcataccatagtacacaatcgtatcacttgcgattttcaaacgactcacaaatggatcatcagcatttagcaataatttgatgcctttattactaattgtctctgcaatgttattaaccataatatcaatttcaccgaagcgatccatttgatctctaaagaaattagtaaataccatcattgaaggtgtaacttcttttaacacacgtggaatcgaaccttcatcaatttcgattaccgcaattttagtcttaggtgttgattgcatgatgaatgcagaagttatacctgcagccatattagcaccttcattattgtgtataatttgaatattatttgcttttaaagtatgtccaattaagtttgaagtcgttgttttaccatttgttccactgataaatacaatatcatcaacttgctctgctaattttcttaatatatctgtatccacttttctagcgatttgtccaggtaaatctgttcctcttttacctactgctctacttgctttacgcgccaatttcgctagatggattgccgtccactgtctcatgtgtttcctcctcaaatttccactcgcatcattataacatgacaaggcaacttcaaaaaagtttctcaatcacaaattgatacagtgtttctaaattataatcattctcatttagataattaaaaatgatatttattctcaattaaatatcgctaaatgatacattttctcaattagagtgctaaaataaggtgttaaattataattattattatttacaattgagaatgagtttgttatactaagtttaattcatagtaattttaatttacaaataagaggtgtatcaaaatgttaagtaaaaatttattagaagcattaaatgatcaaatgaaccatgagtactttgcagcacacgcatatatggcaatggcagcatactgtgataaagaatcgtacgaaggatttgcaaacttcttcattcaacaagctaaagaagaacgtttccatggacaaaagatttataactatattaacgacagaggtgcacatgcagaattcagagcagtttcagcaccaaaaattgacttttcaagcatactagaaactttcaaagacagcttatctcaagaacaagaagtaacaagacgtttctataacttatctgaaatcgctcgtcaagataaagattatgcaactatctcattcttaaactggttcttagatgaacaagtcgaagaagaatcaatgtttgaaactcacatcaattatttaactcgtatcggcgatgacagcaatgcattatatctttacgaaaaagaacttggcgctcgtacattcgacgaagaataattaaacatcactacaatagacagataaatatcatacgacatgataggcatttgggtcacttacaataacccaatgtctatattattttgctttacggagatcactagattcattttctgaatcattgatctgcgttttttcattttcaaggctaattattgtatttttagtcatttattttttaaactactaatgttaataactctaaatttgatgttgaattaatttgaccgattttaaagcatatcatcatttactttttaatcagagttacatccaaatgatagatttcacgttataccttcacgtataatattatgtatcgtttgtaagcaaatgactaaaagtctattaatatatacatttaattaattgaaaggattgactacatgatacaagatgcgtttgttgcacttgattttgaaacagcaaatggtaaacgtacaagtatttgttctgtcggaatggttaaagtcattgatagtcaaataacagaaacatttcatactcttgtgaatccgcaagactatttttcacaacaaaatattaaagttcatggcatacaaccagaagatgttgaaaatgcacctacgtttgactacgtatttccatatatgatgcaatttattgcagatttacctgttgtcgcacataacgcggcatttgatatgaacgtcttacatcaaagcattcaaaatattggtttaccaacaccaaatttaacttacttttgtagttatcaacttgctaaaagaaccgttgattcgtatcgatacggtttaaaacatatgatggagttttatcaattagattttcatggtcatcatgatgcattgaatgatgccaaagcatgcgcaatgattacttttaggctactgaaaaattatgaaaatttaacatatgtaactaatatttatggtaaaaatctaaaagataaaggctaggactaaataaaatactcccttcaaagtaagcattgtaaaaatgtaaactttgcagggagctttattttatataaagtcatatatcgtcatatttttataagttgattgttctaaattacctacagtgacaccaataagtcgaattggtacatcagggtcttttaaatcgttataaagtaaatatgcaatattataaatatcttcttcagaactaaccgaatctcttaaactcatctgtttagatagcgtttcaaattgataagttttaattttaaccgttacagttttagctgacttctgtaatttatttagacgttcagctgttttacctgacaattcccatacttttcttaaaatctcttcatcatcattcacgtctgttgcaaatgtgcgttcagtccctactgattttcttactcttgatgatttcacttcactatggtcaataccgcgtgccttgttatataaaccccgacctctttttccaaacaaacgtattaattcaaattccgttttctcatataaatctctaccgttaaaaataccattatcatgcattacttttttggaagctttacctacgcctggaaaatctccaatatccaatgtcatcaaaatatcatggacattttgataatcaatcacagtcataccatcaggtttattcataccactcgctaatttagctaaaaatttgttataagaaacacctgcagatgctgttaaatgtgtctgctctagaatatcttttctaatatactgagcaattttcgaagcaggaaggtctggtctcactaattctgtaatatctaaatacgcttcatccaatgacatcggttctaccttatctgtataacttcggaaaatagacataatctgcgcagatgtttctcggtaagcaccaaaattacttgtgacaaagtatccatttggacataatttatgcgcttgtgacataggcattgctgaatggacgccgtattttcgtgcttcataagatgccgtagagacaacacccctactgcttgctttaccaccaacaataactggtttccctttcaatttggggttgtctctcatttcgacttgtgcaaaaaaatagtccatatctatatgaataattcgtctctcagtcaagtgctcacctccctactaatttttacttttataacgcacaaaaatatctcaacataattatacgctgtgtacgatttttttacataaatcttgcacttagcgataactatattgagataactacaagttgttataaaatcaattgctatttaagcatgatgatgaagacgattgagtaagaaaacataggtaatctgaaataattcaagcaaattcattttgttggtatcatcatattaaaatttattattgagccggcttttgatgatacaaataaatactatcttcatcttgttgaacatatttaaaactactagatattgttaatgcaacaagcagaatatctataaagcaataagcagtatgcatactaaacataaaaataagtgatgaataaccaaataccttaattaaaataagcaagccagtacttaataggattagtggtgacagcataataattgagaattgccatttgttgaagcaagcatctgctgtttggaataagattctgtctttttttatattaaacataggtttgctatcttttttaaataaaagaaataatgctctatggataagttcatgtaaaatcaataaaataatgaatccagcaaacccatatacaagattgatgatgatattttgatcgacaaccgctgtgacacctaacgcccacttatacgtaaataaaatcacgaataacgcaataacaagttgcaagataataaaccttcgcatttgaaaattatttgtcgttaaatcaattttatgcattaccaaccctcccgatcatgacattcttattcttctttaaatatagtatacaatgtcacatttaatttaaaaagttcatatcaagaaagtaaattggctgtaataaaattttaatatacgacttctttcttcacttattaaggcgaaattttatctcaaatcatgtgcgctatttcaaattgaataatgccactgtctcaacatgtgttgtttgtggaaacatatctaccggtgttacctcttcaagttgatatttttcagctaataataatgcatcacgttgctgtgttgcgggattacatgaaatatagacaatacgcttaggttctaatgtaagcaaagtctgaataaacgtttcgtcacagccctttcttggcggatcaaccattacaacatctggtttaatcccttgtgctttccattgtaaaataacttcttcagctttcccacagacaaaagttgtattattgcattggtttatagtcgcattttgttgtgcgtcttcaattgcagaaggtactacttcaacaccgtatacatgttttgcatgtggtgccatatatagccctattgttccaataccacaataggtatctaatacaacttcattacctgtcaattgcgcatattcaattgctttattatataatttctctgtttgttcagaattaatttggtagaatgactgatcacttattttaaatgtactatctgttaattgatcaataattgtatctttaccatatagcgttatagattgacgccccataataacattagagtggctatcattaatgttttgtttaatgcttgtcacattaggaaatgcatctaatatcttctcaacaacagcatttttttgtggccactttttaccattagttacaaaaataatcatcatttcgtctgtatgatatcctgttcttacaaccaaatgtctcattaaaccttttttcaattgttcttgataaatacttacatttaaatcttttaaaatagatttaacttcattcatcacttcttgatgttgtgaatcttgtattaaacaactttccatgtcaataatgtcatggcttctttgacgataaaagcccataataacttcattctgttcattcttaccaactggaatctgggacttgtttcgatatctccaaggatctgtcatgccaactgtatcgttaatcttagaattatcaaaatgcgcttttcgctgaaacaaattaatcacttgttcctttttcatttcaagttgtgcttcgtatgataagtgttgaagttggcacccaccacaacgttcataatatatacatggcggtgcaacacgattctcacttctcgtatttatattaagcaacttacctatcgcaaagttcttttttactttgataattttatattcaatttgttcattaattaaagcttgtggtatgaaaataggaaagcgatctatttttacgacaccatggccttcatgcgttaaatcaacaactgttcccgtttttatgtcatttttagctattgcttgcaaaattttacctccaaaatgaacaggttaggaacaaaattatgcgcttcctaacctgccattatatatttcactatttctgtttattcttcgattaaattgtcatcaacatgatcattatttattaactcttcatttacaatatcattaggtgcaaagacatctatatgacgttctagatttaagaaattcgctggtaatttaccaccatattctccatctacatttagttgtaagtctgtgaatgatgaaatattaattgcctttgctttttcataaataactttaggatgcttagtatgttctcctcttgaagctaaagtcataatatgaccaagttctgcaaggtttgatttttcaactataattaacgtaaaatagccgtcatctaacttagcgtccggcactaatttttcaaatcctgccattgaatttgttaaacctaaaaagaataataatgcttctccttggaaaacattaccatcatattcaattcttaaatctacagctttcatttgaggtaacatttcgaaacctttgatgtaataagcaaatggaccaacaatagatttcaatttactcggtgtttcataagagacttgcgtcaattgtccgcctgcagctaaattaataaagtatcgattattcattttaccaatatctactttagtagaatgaccttcaatgatgacatcaagtgcccccatgatgtcattaggtatatgcaatgcacgtccaaagtcattaacagtacccataggaatgacacctagcttaggacgattaggcttttctgcgataccattaactacttcatttaatgttccatcaccacctgcagcgattaatacatcataattttcatgcatagctctttctgcttcaagtgtggcatcacctattttctcggttgcatatgcactcgtttcatatcccgctttttctaattttattaaggcatcaggtaattctcttttaaatagctctttacctgatgtcgggttataaatgattctagcacgtttcctcatatcttatccctctacttaaaattcatatattttaacatcatctttgtttcgtctaatagggagtgggacagaaataatatttaacaaaatttatttcgttctaccccaacttgcacattattgtaagctgacagaaagtcagcttctttgttggggccccactagaattgaaaaaagcttgttacaagcgtattttctttcagtcaactactgccaatataacattgtagtgcctaggacattgaatttatgacccaggctcagtcttatttcatcattcttaatatcgttaaagaccaacttgtatcttaaacaaatactatctcaatatgtacaaagcttgttatttattcagcattttttgccgttcttcattatatagacttcgtcagttatgctattttacctttaaaatgatgttgtaaatataatgttgtctttatacaaaaatgttttatacctttttattatacagtttgccttaatataattaaagctaacgcattaataaaattaatatttttaccattaacatgtacaatgaataaagttaaaagtaatatgacttctatagatataaataaaccctcgattgcatctaagtcagcaatcaagggtttattttttaaatcttcatagtttgatgatttaaattatcttttatctaattcttgttttaatagttgatttactaattgtggattagcttgacctttagacgctttcataatttgaccaactaagaagcccatagctttgcctttaccatttttgtaatcttcaactgattgttcgttattgtctaatgcttcatttacaaattttagaagtgttgcttcatcagaaatttgaactaagccattatcttccataatctgtttagcattaccacctttagctgctaactctgggaagactttcttcgcaattttactgctcattgttccgtcttcgataagtttaatcatacctgctaaattttctggtgttaatttagtatctaataattctacttgatttttatttaaatattcgtttacgccacccattaaccagttagatgttaatttaacatctgcaccgtgttcaattgttgattcaaagaaatctgacatttctttagtcaatgttaatacgtgtgcatcgtatgcaggtaaacctaattcatttacatacttagctttacgttcatctggtaattcaggaattgtctgacgaacacgctctttccaagcatcatcaatatataaaggtacaatgtcaggctctgggaagtaacggtaatcatcagaaccttctttaacacgcattaaaattgttttacctgtagattcatcaaatcgacgtgtttcttgtccgatttctccaccatttaacaattcttcttcttggcgtttttcttcatattctaaacctttacgtacatagttaaatgagtttaagtttttcaattcggctttagtaccaaatttttcttgaccatatggacgtaaagagatgttagcatcacaacgtaaagatccctcttccatcttaacgtctgatacaccagtgtattgaataattgaacgcaatttttctaaatatgcatatgcttctttaggtgaacgaatatctggttcagatacgatttcaattagcggtgtaccttgacggttcaagtcaactaatgaatactcacctttatgtgttgacttaccagcatcttcttccatgtgaagacgagtaataccgattcgttttgtttcaccgtcgacttcgatatcgatatatccattttcaccaattggttgatcaaattgagaaatttgatatgcttttggattatctggatagaaatagttcttacggtcaaacttagattctgttgcgatttccatatttagtgccattgcagcacgcattgcccagtctactgcacgcttattaacaactggtaagacacctggatatgctaagtcgataacatttgtatttgagttaggttctgctccaaaatgcgctggtgatggagaaaacatttttgagtccgtttttaactctacgtgaacttcaagtcctataactgtttcaaaatgcatgatttccactccttataatttttcataaacgtcatgtaaattgtattgtgtttcatattgataagcgacacgatataacgttttttcatcgaatggtttaccaatgaactgtaaaccgattggtcggccatttgattgtccacaaggaacagaaataccaggtaatccagctaagtttactggtgttgttaataaatcattggcatacattgttaatggatcatcaatttcttcacctaaattaaacgcagttgtaggcgctgttggaccaactactacatcataattttcgaatactttatcaaagtcatttttaatcaatgttctaactttttgagattttttatagtaagcatcgtagtaacctgaacttaatgcaaatgtacctaagaaaatacgacgttttacttctttaccgaaaccttcagatcttgacattttatataattcttctaatgaatgagcttctttagaatgataaccataacgaattccgtcaaaacgagaaaggtttgacgaagcttctgatgatgcaatcacgtaatatgatggaataccaaatttagtatttggcaatgatacttcctcaacgacagcacctaaagattttaaagtttctacagcgttttgaactgcttcttttacgtcatcagctacaccttcacctaagtattctttaggtaatgcaacttttaatcctttaatatctttaccaatttcagatgtaaagtctacatcatcaactggtgcacttgtagagtcattaacatctgcaccagaaatagcttctaatacgattgcattatcttttacatttcgagtcaatggaccaatttggtctaatgaagatgcaaaagcaactaatccaaatcgagatacacgaccgtatgttggtttcataccgacaacgccacaatatgcagccggttgtctaattgaaccacctgtgtctgaacctaagctaaatggtactaaaccagctgcaactgctgctgcagatccacctgatgaaccacctggtactgctttatggtcaaatgggttaactgtttttttgaaataagatgtttctgttgaaccacccattgcaaactcatccatatttaatttaccgattaaaacggcattctctttatgtagtttttccattacagtagattcgtaaattggcacaaaaccttctaacattttacttgcacatgttgtttctaatccgtttgtaataatgttatcttttatacccattggaataccaaataatttgccatccatttgatcttttgcttgtaattcatccaattcttgcgcttttttgattgcattttctttatccagcgctagaaaagacttaattgttggatcagtctcttcaattgcatcatatatatctttaacaacatcagatggtttgatttttttgtcttttattaaagttaataaattctcaaccgattcgtagcgaatgctcatcttacgcgtcctcctcattcatgattgtaggcactttaaattgtccatcttctgtttctttggcatttttcaaagctaattcttgcggaatacctttaattgctttatcttcacgtaaaacgttttgtaaatctaaaacgtgatatgtaggttcaacgccttctgtatcagcgctatcattttgttttgcaaaatctaaaatgctttctaatgtgttggccatttcttccgtttcttcaggagaaatttgaagtcttgcaagattcgcgatatgctcaacttcttcacgtgttacttttgtcattaataaaagcctcctttaagtcattcatcactaaattgtatcaaatttccaattaaaaatctaagtatttatgaggtgctactttaatttcatataaactgtataaacattatcattcgtttatcaaatcattttttatgaaaacaacactcttttaatattagacaacccaattcaatattatgattatgcaattttaattataaaaatttgctcatatccaaaaaatacgaaagcgctttctatattggtatgcaagtatttcaaaaagaataaatttaattttcctacttttctaaacatttatctttatgtataatgttttcaagtaactaaattataaattaaataaagggagtgtttatcatgcttacaatggggacagcattaagtcaacaagtagatgccaattggcaaacttatattatgattgccgtctacttcttgatactaatcgttattggcttttacggttacaagcaagcaactggtaacctaagcgagtacatgttaggtggacgtagtattggaccgtatattactgcattatcagctggagcttcagatatgagtggatggatgattatggggctacctggttctgtctatagcactggtctatcagctatgtggattacaatcggtttaacattaggtgcttatataaattactttgttgttgctcctagacttcgtgtttataccgaattagctggagatgcaattacattaccagatttctttaaaaatcgtttaaacgataaaaataatgtgttaaagattatttctggattgattatcgtagtattctttacattatatacacattctggtttcgtatctggtggtaaactatttgaaagtgcttttggattagattatcatttcggtttaatattagttgctttcattgtcattttctatactttctttggtggatatttagctgtatcaattacagatttcttccaaggtgtcattatgttaattgcgatggttatggtccctattgttgctatgatgaatttaaacggctggggaacgtttcatgatgtagcagctatgaaacctacaaatttaaatttatttaaagggttatcatttataggaattatctctctattttcatggggattaggttatttcggtcaacctcatatcattgtaaggtttatgtctattaaatcacacaagatgctacctaaagctagacgtttaggtattagctggatggctgttggtttattaggcgctgtggctgttggtttaacaggtattgcattcgtacctgcttatcatattaaactagaagatcctgagacattattcatcgtgatgagtcaagtactcttccatcctcttgtaggtggtttcttacttgctgcgattctagctgcaattatgagcacgatttcttcacaattacttgtaacatctagttcactaacggaagacttttataaattaattcgtggtgaagaaaaagctaaaacgcaccaaaaagaatttgttatgattggaagattatctgtattagttgtagcaattgttgccatcgcgattgcatggaatccaaacgacacaattctaaacttagtaggtaacgcttgggccggatttggtgcatcgttcagtccacttgtgctatttgcactttactggaaaggtttgacacgtgccggtgctgtaagtggaatggtttcaggtgccttagtcgttatcgtttggattgcgtggattaaaccattggcacatatcaacgaaatattcggcttatatgaaattattcctggatttattgtaagtgtaatcgttacatatgttgtaagtaaacttactaaaaaacctggtgcatttgttgaaactgacttaaacaaagtccgcgacatcgttagagaaaaataattcataagtcttaacaaattaaaaaggtactaatgttaatcaaaattctgactaacattggtacctttttattatctttaaattacaattaattactgtaaatatgaacttgcggttctttgtcatcttttgtcttactaattaaagcacgtggttggttaccatctttaatacgaatttcatagttatcgattttatcgaaatatttattcgcttgttcagtaacgtactgtgtaataccaattgtttcagcttgtccatagtaatcgattggtaaatctactactaatcgttgtggctttttatcaacaaatttaactttccctactgcttgtgtgaaattagaaaaatatgattgcaaattatcattaaattgcttgaaattattatttaaattttcatcataatctactgctgttgaagaaggtaataaagctgatttttcattgatattatgccattcattaagctttgtttgactcttttctgcagtcgcttgagtgataaattcacctggtgtgattgaatcttcacttgattgcttataaattgcaaaatgaattggtatatcttttaaatcatcattttcacgtaaccttgataatatctcactagccatttgtttaccttgctttttaacttcgctatcatctagttttttactaaaagtcggtccatctttttcttttttatagtaataaacactattcatagctaaaccaatcgtcatacctttaatattcttaccttttgtatctccaccaccataaaaatcttgctctaaaatgttagataaataggctggtgatttttctgcaatcttttcaggatctgtttcaccttcgtgtgatggattaagtcctaaattttcattcgctttcttgtcttttttatctttttcagacatcttatcgatttcacgttttgtatacttaggatttaaataggcattaattgttttcttgtccaaaaattgaccatcttgatacaaatatttatctgttggaaatacttctttacttaagttcaataaaccatcttcaaagtcgccgccattataactatttgccatgttatcttgtaaaagtcctcttgcctggctttctttaaatggtaacaatgtacgatagttatcaccttgtacatttttatccgtagcaatttcttttacttgatttgaactattgttatgtttttgattatcttttccagcctggtcatccttatggttaccacaagcagcgagtataaagatagctgtaatcaataatactaatgtacgcttcatcgacatacccctctaactatttaattcattttgcttatctacaaattgttgctctgtccaaatttcaatacctaaactttgtgcttttgttaattttgaacctgcatcttcaccagcaataacgacatctgtatttttagtaacgctacttgtaactttagcaccttgtgatgcaagccatttagatgcttcattgcgtgtcatttgatgtagcttaccagtcagtactatcgttttaccactaaattcaggatgtccttcaatatctgatgttttgatacctttataaatcatattaacatgtttatcttttaatttttgaattaaagcacgaatatcttcattttctaaataagtaactacagattgtgctactttatcacctatatcatgaatttctactaattccgcttcagttaccgttagtaatcgatctatcgtttcatatttttctgctaacacttggctcgctttaacacctaaatgcctaatacctagaccaaataataaattttctaaagagttgtccttagcttgttgaatggcagctaataaattatcaacttttttctgccccattctgtctaaaggtaataaatcttcttctgttaaatagaaaatatcagcaacatctttaattaattcgctttgataaagctgttgaataattttagtgcctaaaccatcaatattcatggcttgtcttgatacaaagtgaatcaatccttcaacaagttgtgcttggcattttggattaatgcaacgaagtgctacttcgccttcaatacgtactaattcatgtccacaacttggacaatgggttggcatatgatatgtgacagcatcctcaggtctacgttctggaatactacgtacaacttcaggtatgatgtcacctgcttttttcactacaacactatcaccaattcgaatatctctgtcatgaattaaatcctcattgtgcaaagatgctcttgatacagttgtaccagctacttttactggttctaaaatagcagtaggtgtgactacacctgttcgtccaatacttaattcaatatctaataatttagttactacttcctcagctggaaatttataagcaatggcccatctaggagatttttgtgtgaatcccatctcatcctgttgatctaaatcattaaccttaataacaatcccatcaatatcataaggtaatgactctctttggcttgtccatttttcaatatactctaaaacaccatcgatattatttacacgcgctctatttttattcgttgtaaaacctaatttatctaactcatctaatgcttcactttgcgaacgcgcattgaaatcagtgaaatcattgacactatatataaatacgcttagctttcgttttgccgttaatttagaatctaactgtcttaatgatcccgcagcagcgtttcttggatttgcaaataactgctcatcatttttttctttttcttcatttaatcgtaaaaatgaacgtctcggcatatatgcttcaccacgaacttctacatttaatggttctttcattttcaaaggtatcgcatgaattgtttttaaattttcggtaatatcttcacctgttgttccatcaccacgtgttaaaccttgaacgaagtatccatcaacatatttcaatgatactgctaagccatcaatttttaattcgcacatatattcaacgttgccaatttgttcacgtatgcgttggtcgaattttctcaaatcatcctcattaaatgcattccctaaacttaacattggcgtgtcatggttgactttattgaaagaggcttgggcttcaccgccaactctaactgttggagaatctacagtcttatactcaggatgctcctcttctattttaatcagttcatgaagtaatttgtcatattcactatctggtacagatggattatcctctacatagtattcataactgtattgatttaataaatcatgtaactcgttcacacgagacgataaatcagccatcccttaatcctcctttttttcaattggtgcaaattgcgctaacaaacgttttggcccttgtgatttaaagataatatctagttcgattgagccatttttctcgtttacattactcaccatgccttctccccaggctttatgcatcactttgtcacctacattccaatcagatgacaatacttgttttttcgttgacgttgttcgttgactaaatccgcgtttagcaaaaggttttgccttaggttgtatcgtttgtcgtttgccacttgaatgattttctaatagtgattctggaatttcctttaaaaatctggatggcatatttgactgagggcgaccaaataacattcttgatgtcgcatgagtgatatataacacctcttcagcccttgtaattgctacataacaaatacgacgttcttcttgcatttcatgatcatcttcactcttaatcgctctaatatgtgggaataaagattcttccatccccattataaagacaattggaaattcaaggcccttagccgagtgcatcgtcattagtgttacgccattttcagtatctgcctcatcaatatcagctactaacgataaatccgttaaaaagttaattaatgactgttcttctaatggggtattttcctcatagtcttttggtactgacataaattcatcgatgttttctaatctacttcgagattctaatgtattttcacgttcaagcatttctcgatagccagacttttgtaatacttcatcaactatttcatgaatttctaaaaattcttgttcttttatcaagctttggattaactcgtaaaaattaagacactcttgtgtcaccttttttgacaatccgataaaatcagcttctccaagtgcatcaaacatactgatattgttttgaagtgcatagttttgaactttttcaacagatgaaggacctacacctctttttggaacattaataatacgttgcaaactaatgtcatcattactattggcaattatacgcaaataacttaataaatctttgatttctttacggtcatagaacttttggccaccaaccattgtgtatggcatattagatttcatgaatgtttcctcaagtacacgtgattgtgcattcgttctatataaaattgccatatcttgatatttcttaccattacgttgatgcttcataatttctcgtattacaaattccgcttcatcacgttccgtcattgcttcatagtaatgaattttctcaccattcgtatttgcagtccacagtccttttggcttacgttcagaattatttttaatcacttcgttagccgcatttaaaatcgttttcgtcgaacgataattttgctctaaaaagattgtattcgcttctggatagtctttttcaaatgataagatattttgaatatcagcaccacgccaaccataaattgactgatctgagtcacctacaacacataagtttttaaacttacttgctaataatttaactaatgtgtattgtgctttattagtatcttgatactcatctacatgaatatattggaatttgttctgataatattctagaacttctggtacacgctcaaataagttaatcgttgtcataataaggtcatcaaaatctaacgcttcattacgtgacaattggcgttgatatccactataaaccgttgctaccatttgcgagtgataatctgtggcttctttttgagcatctgcaggtgttttaagttcatttttcaaattactgatcgcaccgataaacatacgaggttcaaactttttactatcaatattttcattttttaagacgtctttaataacagatttttggtctgtaggatcaattatcgtaaaattgcgttctataccaattcgatctgcatcacgacgtaaaatacgaacacacattgagtggaatgttgacatccaaataacttctgcttgatcacctactaatttttgaacacgttctttcatttctcttgcagctttatttgtaaaagtaatagccaaaacattgtatggtgagacatctttttcgtctaataaataagcaattctatgtgttaaaacacgtgtcttccctgaaccagcacctgccataattaacaatggtccttctgttgtctttacagcttcactttgctctgtattcatatgatttaataacgcattcatttactagactcctttatttttactgtttttaaagcttttttaatatctttataaataatatcaccgacgataattgtatctgcaatagctgccatctctgtcgcttgttgttctgaggaaataccgccaccataaaaaagttgcgtttctgttagatgttctgagacagcttgaacctttgatacgtcgccataaatgccactatactctatatacataaccggtaatcgatacatatgattgaccatttgggcatatgcttctaaatcttctgttgttaaatctgtatttgctttggtatgttttgccactttgctatcagcattgcacacgacatacccttcaaatattacttcctcaaaatctatactatgtccatatgttttaagcgcttctaataatgtaccattgtgaaatacaacatctgtactgttcagtactgtaggtacaaaataaaaatcaaaaccaggcattacactttcgatgtttgatatttcaagtactaaaggcaatgggtatcttcttactctgctcattaaatgaatgacattatcttcagtaacgtcatcagttccaccaatcataattgcatctgtttgagacatacaaatcgcatctaaatcatcatctgaaatatgtttagctgggtctaatttaaaaatatggcgccattttttaatgtcatacattttccgaaactccttttttaacatacatatgattatagcatttttaagtgtcgagttctaaagacttaatatgaaatttaagttcttttactctgtaaattttttcgtgaaaaaacaatgattatctaccttattagtgcagatagataaccattgtttatcgttcatttattattcatttgtttcaatattcatacgatctaaaatcattgtataagcatcattaccccattgtaatgaacgcttcactctagaaatcgttgcagtcgatgctccagattcttgttcaatcgttgcataggtataaccttgcttaatcattttagcaacttgtaatctttgagacagtgattgaatttcatttacagtacacaaatcatcgaaaaattggtaacattcttctctattttctaacgttagtattgcatcaaacaattcatctaacgctgcacctcgtaatttttcaatttgcatatcgaaacaacccctataattttattctttatgtcattttaacgcattaatctattaaagtgtagcgatttatattttattaaatctgaatcgttactttatttaattttatgctaatccagcgcgttcgaaaatagtgtcaacttgattcaaatgatgtttaggatcgaaacattcatccaattcttcttttgttaaaacacttgtaatagactcatcttgttcgattaattcacggaaaggtgttttcgtttcccaagatatcatcgcttttggttgtactttgtcgtatgcttcttcacgaaccatacctttattaattaatgctaataagacacgttgtgagaaaatcagaccaaatgttttatctatgttattacgcatattatcttcaaatacagttaaacggtccacaatatttgtgaaacgattcaatgcataatctagtgctattgtaacatctggtaacataatacgctcagcagaagaatgagaaatatctctttcatgccataatggcacattctcataagctgtagtaatataaccacgaatgactcttgaaatacctgtgatattttcagaaccaattggatttcgtttatgaggcattgcagatgaacctttttggccttttgcaaatgcttcttcaacttctcttgtttcggttttttgaaggttacgaatttcaacggcaaatttttctagtgacgtcgcgattaatgctaatgtcgcaatatagtatgcatgtcgatcgcgttgcaatgtttgcgttgatacaggcgctgtgccaatacctaaatgtttacacacataactttctatttcaggaggaatgttagcaaaagtacctactgcaccactcattttccctacttcaatttcttctcttacttgtttgaaacgttgtaagttacgttgcatttccgtgtaccacaatgccattttgacaccaaatgtagttggttctgcatgcactccatgtgtacgtcccatcatcaatgtatatttataattttttgctttttcagctaaaacgtcgataaatctttctaaatctttttcaataatgtcatttgcttgtttaataacgaaacttaaagctgtatctacaacatcagtagaagttaaaccataatgtacccacttacgttcttcacctagcgtttcagaaacttgtctagtaaaggctacaacatcatggcgcgtttcttgttcaatttcttgtgcacgttcgacatttacctttgcgttttgacgaattttttgtacgtcagctttcggtatatgtcctaattcactccatgcttcacatgctaaaatttccacttctaaccatgcttcatagcgattttgatcagtccaaatattagacatttcttctctagaatagcgttcaatcatttttttaactcctatcgtatgtatactcgaattttcaaaaacagaacatttttaataaaaataaacaaaaagttcgtttttaactctactcttcacagtttaacagaattggttataaatgtataaaaaatttccgtatattctcattctattttattttttacattaatacaattatctatggcagattaatactgatttctaattgtaaatgttcgcaatactttaatctaattggtatttataatgatccattaagaatatattattgcattttagtttttctcccctcaactacactatccaactttttattacaattaggacaatcaatagctttagtaataccagattttattcactttacttctcctattgtatggaattttcaacaatctactttacctagtttcataatactccttcttacatttccataatatgttttaaaattattcacttctaatataacaaactttctactcacaaaaagaatatatgttctattgcataggtatggcattttaaatataagacattaatattgaactccagaatcgtataaatacgaaactgattatagaaaaatacgcagagattttcttaatagtaaatttttatagaaagacataaattgactacgcttctttcaaaatcgactaatatattttcatgaaactttcgatcatattaattattgaatgagatgtttacaatttagtaaataagctactaaattattacataaactgataatgtgtaaaaattaaatattttttaaacatagattaaaaatttatattgaaactcttaactaaatttaatataattattttataataaaataaaggagtttttatatgaaaagaaactttccaaaattaatagctttaagtttaatactttctttaagtgttacccctattgcaaacgctgagagcaattcaaatatcaaagcaaaagataagaagcatgtgcaagttaatgtcgaggacaagagtattcctactgaagtacgtaatttagcgcaaaaagactatctttcttatgttacttcacttgataaaatctataataaagagaaagcctcgtatacacttggtgaaccttttaaaatttataaattcaacaaaaagagtgatggtaattattattttccagttttgaacactgaaggtaatatcgattatatagttacaatttcaccaaaagtcactaagtattctagttcatcttctaaatacacaatcaatgtttctccatttttatctaaagtcttaaatcaatataaagatcaacaaattactattttgacaaactcaaaaggttactatgtggttactcaaaatcataaagctaaactagtactaaaaacaccacgtctagaagataaaaagttaaaaaagactgagagtatacctactggcaataatgtaacgcaactaaagcaaaaagcttctgtcactatgccaactagtcaatttaaaagtaataattatacttacaacgagcaatatgtaaataaacttgagaatttcaagataagagaaactcaaggtaacaatggttggtgtgcaggctatacgatgtctgcattactaaatgcgacttataatactaacaaatatcatgcagaagctgtgatgagatttttacacccaaacttacaaggacaacgattccaatttactggtttaacgccaagagagatgatttattttggacaaactcagggaagaagtccacaacttcttaatagaatgactacatataatgaagttgacaatcttactaaaaataataaaggaattgctgttttaggtagtagagtagaatcaagaaatggtatgcacgcagggcatgccatggcagttgttgggaacgctaaattagataatggacaagaggttataattatatggaatccatgggataatggttttatgactcaagatgctaaaaacaatgttattccagtatccaatggcgaccattatcaatggtattcatctatttatggttattaaaatttgtattttagaaaggtaaataatattatggaacaatttgaattatttagtattgataaattcaaatgtaattcagaggctaagtattatcttaatattattgagggagaatggcatcctcaagatttaaatgatagtcctttaaaatttattctcagtacctcagacgattctgattacatttgcaaatatataaatacagaacacaaacaactcacattatataataaaaataatagctcaattgttattgaaatatttataccaaatgataataaaatactactaacaattatgaacacagaagctttgggaacttctcctagaatgactttcattaagcaaaagtcataagactatctagatatgattaagtaaactattaatcttattaaaggtctctaggaagaaaaaatttcatgcgatgagatttttttagaaaaagcgacgatatatataatctaacaataatttttaaaatattaagaacccccagcatatgctttatatagcttgctgggggtttctcatacaatatggatcgagcatcttgcatgtataaacaaataggctattcaaagtaaaattactcaaactttgaatagcctttcctcttcaaatagtctttatttaaattggattatgttattggattttcttacctacaaaaatgatttcttgatgtgatacttcaaccgtgccatctttttgctcttgaaacacgggtttttcaatacgttttaccggcatatacccttgcattttcattcgtgacaaacaatcagcaattgtttcattctcatttactttgaatttcatgttctactacactttccagttcttctggttcataatctttaagctttctacgacgaatgcctttagtccagaatccaccatgtatgtttcgaggttcatacgcaatgataaatgctttcggatctaaattttttatcgtatccatcaatttacgttcatattttcttggtgttaaaatttgcatcaccatacgactaccatctctaccaaacgcagcatagtgcgtaacgccatatcctaaatttcgaagttcattcggtaaatctaactcatattctgctgaagttacatttacaactgtataacctaatgccagtttttcttctattttcataccaacaatgatacctattgaaaaaccaaatgcgtaggcaataatattttgaatatggtctaaattagacataaccaaacctaaaccaacgatataaactaatacttctaaaaaactaactgatgcagcaatataacgataacctttcaacgttaaaattgttcgcatcgttaaaaacgttacataacaaacgttaatgataaatatagttagtaccattaaccatggattttctgttacgaatgacataaggcgccccactctctttcaattacactttaaataccaaactgcttcaaactaaccttaatgaatgcatattaatataatatagtacgaaaactctcataaataaatagcgaatttgtcataaataaaaatttattctcaaatgaacatacttactttagttcatacactttcaatttatacactgaagtagtctagctgaatgtggtttaatgttattaattctaactcatatttaatttaagtcacacgttagaagaaaaaattaaattaggattttggccacgtgtatcttgtatatgcaagttcacgtttgtgtgcatttcgtatataatgattttcaattactttttgttcttctggcgtaactggcttaccttctaaataattatcaatcgcctcataagttacacctaatgcatcttcatctggaagctgtggtttatcatcttctaaatcagcagttggcgttttttcatataattcctttggcgcaccaagatacgctaataattgacgaccttgtcgtttattcaaaccaaatataggtgcgatatctgcagcaccatcaccgtacttcgtataaaaaccagttatattttctgcagaatgatcagtgccaactacgataccttgtcggtttgaagcaattgaaaattgtactttcatacgttcacgcgctttttcatttcctttttggaaatctgtaagaacaataccggcttcttttaatgattgcacactttgatcaactgcaggcttaatattgactgttactatttcatctggttcaatgaatcgcaaagcttggtcaacttcatcagcatctttttgaactccataaggtaatttaactgcaataaacgtacaatcaatgccttcttcacgtaattcgttaacagacatttgtactagttttccaactaatgtagaatcctgtcctcctgaaatacctaacactaaagattttataaatgaatgtgattgtacataattttttataaattgctttaattccataatttcttcagcactatcgatacgctttttcactttcatttcttgtacaataacgtcttgtaatttactcattatcttcttccatctccttaacgtgttccgcaacttcaaaaatacgtttatgtttattatcccaacatgccttgcttaaatcgactggatattcttgtggattcaggaaacgcttattttcatcccaaatagattgtaatcctagtgctaaatattcacgtgattcatcttctgttggcatttgatatactaatttaccattttcataaatattatgatgcaaatcaatggcttcgaaagattttataaatttcattttataagtatgcactggatggaataattttaaaggttgttcatcgtatggattttcattttccaaagtaatataatcgccttctgccttacctgttttcttgtttataatgcgatatacatttttcttacctggcgtcgtaaccttttcagcgttatttgataatttaatacgatcactatatgaaccatcttcattttcaatagctacaagtttatatactgcacctaatgctggttgatcgtatcctgtaatcagctttgtaccaacgccccaagaatctacttttgcaccttgtgctttcaaactcgtaatcgtttcttcatccaaatcattagacgcgataattttagtttcagtaaatcctgcttcatcaagcatacgtcttgcctctttagataaataagcgatatctccagaatctaatcgaatacctacaaagttaattttgtcacctaattcttttgcaacttttattgcgtttggcacgccagattttaaagtatggaatgtatctactaggaacacacaatttttatgtctttcagcatattttttgaaggcaacatattcgtctccataagtttggacaaatgcatgtgcatgtgtaccagacacaggtataccaaataatttccccgccctaacattacttgtagaatcaaagcccccgatgtaagcagctctagcgccccacaatgctgcatcaatttcttgcgcacgacgtgtaccaaactccattaatttatcatttgatgcaatttgacgaattctgctagcctttgttgtaattagtgtatggaaatttacaatgtttaataaaattgtttctattaattgcgcttgaatcaatggtgcttctacgcgtaacaatggttcgttaccaaagcataactcgccttcttgcatcgaacgaatgcttcctgtgaattttaaatcttttaaatatgataagaaatcatccttgtagccaatagactttaaatattccaaatcagattctgaaaatccaaaatgttctataaaatcaatgacgcgttttaaaccattaaaaacagcatagccactattaaatggcatttttctaaaatacaaatcaaatacagccattttttcatgaatattatcattccaataactttcagccatatttatttgatataagtcattatgtaacattaaactgtcgtcttctaattggtacacttgtatctctccaatcgacctaaatattttcttacattttatcataattcatttttttatatacataagagctccttaatttccatacttttaattaaaatcaaccaacaatttaatgacatatacataatttttaagagtattttaataatgtagactataatataaagcgaggtgttgttaatgttatttaaagaggctcaagctttcatagaaaacatgtataaagagtgtcattatgaaacgcaaattatcaataaacgtttacatgacattgaactagaaataaaagaaactgggacatatacacatacagaagaagaacttatttatggtgctaaaatggcttggcgtaattcaaatcgttgcattggtcgtttattttgggattcgttaaatgtcattgatgcaagagatgttactgacgaagcatcgttcttatcatcaattacttatcatattacacaggctacaaatgaaggtaaattaaagccgtatattactatatatgctccaaaggatggacctaaaattttcaacaatcaattaattcgctatgctggctatgacaattgtggtgatcctgctgaaaaagaagttacacgcttagcaaatcacttaggttggaaaggaaaaggtactaattttgacgtgttaccactgatttaccaattacctaatgagtcagttaaattttacgaatatcctacttcattaattaaagaagtacctattgaacataatcattatccaaaattaagaaaattgaacttaaaatggtatgcagtccctatcatttccaatatggacttaaaaatcggtggcattgtatatccaactgcaccctttaacggttggtatatggtaactgaaattggcgtacgtaactttattgatgattaccgttacaatttactagaaaaagttgcagatgcgtttgaatttgatacacttaaaaataattcatttaataaagatcgagcacttgttgaattgaactatgctgtgtatcattcctttaaaaaagaaggcgtatcaattgtcgatcatttgaccgctgcaaagcaattcgaactattcgaacgtaatgaagcacaacaaggtcgtcaagttaccggaaaatggtcttggctagcgccgccattatctccaacattgacgtcaaattatcatcatggatatgacaatacagtaaaagatccaaactttttctataaaaagaaagaatcaaatgctaaccagtgccctttccatcattaagttagtagaggtgtagcatatgcaattatattatttaggccctaaaggtacattttcatatttggcttgtcgtcagtatttttctgaaaaggaaacaacttttcaaccaaagtcaaatttatttgaagtcatcaaggcagttgcagatgatgacacatcgattggtgttgtccctattgaaaattctatagaaggaacaatcaacattgtggcagatgcacttgcacagcaagatgtctttgcacacggtgaaatacgtttagatattaactttgcattatatggtaatggaacagattccatttctgatattaaaaaagtgtattctattgcaccagcaatcagtcaaacaacaaattacatacatcaacatcaatttgactatgattatgtcgacagtacaattcaaagtttgactaaaattgaaaatggcgttgcagcaattgcacctttaggtagtggcgaagcttatggttttacacctattgatacacatattgaagactatccacataacgtgacacgttttttagttataaaaaatcagcagcaatttgatcaaaatgcgacatcattgatgtttttaattacaccaatgcatgataaacctgggttgttagcaagtgtgcttaatacatttgctttgtttaatattaatttatcctggattgagtctcgtcctttaaaaacacaattaggtatgtatcgatttttcgttcaggctgattctgcaattacaaccgatataaagaaagtcattgctattttagaaaccttagatttcaaagtagaaatgattggtgcttttaattaaactttattttctaggttctacaatttaaataaaataaagagtcaaccaaggattaaaataggaatccatccttggttgactttcttttgtttgtattgtttttacacgatgctgctgtatacgtttcattaccactcgttcaagcaattgctaatgtaaccttttatttttcgttctaatctgcaattactatttcaatggcagtggttgatttatatcaatacctaaaactataggcattacataatacacgactaaaataataattattgcactgattaagtttacccagaatcctactgatgccatttgtttgatagatattttacctgaaccaaagataattgcattcggtggtgtccctactggtaacatgtatgcacagttagccgccatagctgcaggtgccataagtagtaatggatgcactccaacagcaacagacaacgttgctaaaatcggtaaaatcatcgttgcagttgcagtattagatgtcacttcagttaaaaataagacaaagattgttatgacaattacaataagaatcggactaacaccatttaatgatttcaactgttcgcctaaccattttgctaaaccactttcagaaatacctttcgctaatgctaaaccgccaccaaataaaattaatacaccccaagggagctcttttgcaacttcccagtcaatgatacggcgatgtttttcagtatttttagctggaataacaaataataatattgatataaaaatagcaatcgtaccatctgcaacggatgacgtaacttcccattttttcagaagaaactctcttgtaatccataataagctggcaagtacaaagatagtttgtactaccttttcttcatacttcattttgccaagctcgtctaacttttgtttaattaacgtctgaccaccaggtaaatatttcaaatcatgtctaaacgcaacatatcttaaatagagccaagtaatacctaacaaaacaatgaccgttggaatccctacaatcatccatttagcaaaactaatttcatgtccaaaatgttgcatatattgtccttttaaaataattaatggcggggttccgattaatgtacccaagccaccaatcgtacctgcatagccaattgctaaaactagagatttttcaaacttttgaatacttgtttgattcgtattggcttcttgtaaatcatgtgcttccttaataattgctaaaccaatcggaatcataatcattacagctgcagtgttcgatacaaacatagataagaatcctgttgccaccatgaatccaagtaatatttttgaagtgcttgcaccaatcaaattaataattgtcaacgctactctcgtatgtaaattccatctttccattgcaattgccaaaataaatccacctaaaaacaaaaagataatatcattgccatattcggatgatacttgttctggtgtaagtatatgacctaatggtaataacacaattggtaataagctcgttgctgcaataggaattgcttcagtaatccaccaagtcgcaatccataaagtaatcgctaagacatatacgcctttccaaggtaagtcttgtggatgaaagaataataatgttaataggaaaagtaatggacctaatattagtccaataagttgtcccgcactaaacggtttctttttctttgattttgaaaagaatgttaaataccttttcgatatcattgattgatgttgattgaaataagccataaatttccccctcatgatgattatgacaagctacttcaactcactatattagagtatagaaagttgtctatcttgtattatcattaccgtcaaaatacccctttcatcagataattgggtttattatagcatatttataccgttttatgaatgcgctttcaaaaattatctactattcttaatcctaatgtcatgcgaaactttttacttttttatttcatctacattgattgtagtaacttgaatacccgcttcaacaggacttaaaaacactgtatcaatatcttctaaatgaattgattgagtcgaattattgaatgtattcccaacgattaatacatctttatgtttaacattattataattacgtacatgtatcgcatctttagacattgatcctttaaattcatttccaattatattcatatttatgcctgcttgggaacctaagtcttttcctgtcatcacatctgctgcatttttaccatctctaactcctaaatatctaataccaccctcacagttaataaacttattattaataatgaaagcatctttatacttcaagggagttaatgcataaccttgtatatcttcaaatatattatttctaatatgaatattctcatagtaacgattatgtctacttgcatgtgagccaatagcacgattccaacttcccatttcgggcaattctgaaggtccaaaataacaatcttcgataacgacatttttcgttatcgtaccatctgtcgttccgaattttggaaaagcaccaggtacttgaatgtctaattgtattgcttcagaataaaagcgttcgccactatagtctataaatccttcaaatgaacaacttttaatatagagtccattaatcccgcaagcatcaattgcatgaccactcactacattcttaatagtcacacctattaattgaatatcttcagcatgcccaatgcacatagctgtattgttataaggatacgatacgccattcatatcaagcttgccgcctttaatatgaatatgactgtgtccattataaccacgataaaaaccaaagcgatgaccattttttaataaaggaccagaatgacatcggcgtaaaatagtttcattatccaacaaaagtgttgtattgccatatatcgttaatggtttgcaaatatcatacgtccctttcggtatataaactgtcgttggtttacatcttccacgatttaacgcatgttgtattgctcgagtatctttagttttgtttatgcctgttaacccataatctttcatattgatatacataaatcgtcatcctttgtctattttctaattactcatatattaaccaattattcaaattataatcgtgttaggttgatttaacagatagtcataaatctcgtgatgccatctattagcatttttatattcaaaacatcaacacttgatattagttctaagtttgtcacatttagtattctattacagctattttaaaactatcgcaaaaacttcttatattatttgttgattgcgtgatttgctcttccaaaaaagttgattaatctatatacttaatctatatttatatattaaccattagggttaaaaattactctagcatttatgaatagatgggagtttattttattattatataggagagatgttgaatgacacatcgcgcactattagttgttgactattcatatgactttatcgcagatgacggcttactaacatgcggtaaacctggacaaaatattgaagattttattgtttctcgtatcaatgactttaattattatcaagaccatatattctttttaatggatttacattatttacatgacattcatcatcctgaaagtaaattattcccaccacacaatatcgtagatacaagtggtagagaattatacggtaaagtaggtaaattatacgaaacaattaaagcgcaacctaatgtacatttcattgataaaacgcgctatgattcgttctttggtaccccgcttgatagtttattgagagaaagaagtattaatcaagtcgaaatcgttggtgtatgtaccgatatttgcgtgttacatacagcaatttctgcatacaacttaggttataaaatttcagtacctgctgagggagtggcttcatttaatcaaaaagggcatgaatgggcacttgcacatttcaaaaactcattaggtgcagaggtagaacaacacgtttaaatcgtgctaaaataattataaagaatacaatttacaagggagatatttgacaatggctaaaacatatattttcggacataagaatccagacactgatgcaatttcatctgcgattattatggcagaatttgaacaacttagaggtaattcaggagccaaagcataccgtttaggtgatgtgagtgcagaaactcaattcgcgttagatacatttaatgtacctgctccggaattattaacggatgatttagatggtcaagatgttatcttagttgatcataacgaattccaacaaagttctgatacgattgcctctgctacaattaagcatgtaattgatcatcacagaattgcaaatttcgaaactgctggtcctttatgttatcgtgctgaaccagttggttgtacagctacaattttatacaaaatgtttagagaacgtggctttgaaattaaacctgaaattgccggtttaatgttatcagcaattatctcagatagcttacttttcaaatcaccaacatgtacacaacaagatgttaaagcagctgaagaattaaaagatattgctaaagttgatattcaaaagtacggcttagatatgttaaaagcaggtgcttcaacaactgataaatcagttgaattcttattaaacatggatgctaaatcatttactatgggtgactatgtgactcgtattgcacaagttaatgctgttgaccttgacgaagtgttaaatcgtaaagaagatttagaaaaagaaatgttagctgtaagtgcacaagaaaaatatgacttatttgtacttgttgttactgacatcattaatagtgattctaaaattttagttgtaggtgctgaaaaagataaagttggcgaagcattcaatgttcaattagaagatgacatggccttcttatctggtgtcgtttctcgaaaaaaacaaatcgtacctcaaatcactgaagcattaacaaaataatactatattactgtctaattatagacatgttgtatttaactaacagttcattaaagtagaatttatttcactttcaatgaactgttttttatttacgtttgactattttacaaccccttttcaatagtagtttttattcctttagctaccctaacccacagattagtgatttctatacaattccccttttgtctttacattttcttaaaatatttgcgatgttgagtataaatttttgttttcttcctacctttttcgttatgattaaagttataaatattattatgtacacgattcatcgctctattttcaactttcaacatatataattcgaaagaccatttaaaattaacggccacaacattcaaatcaattaatcgctttttccaaaataatcatataaggaggttcttttcattatgaatatcattgagcaaaaattttatgacagtaaagcttttttcaatacacaacaaactaaagatattagttttagaaaagagcaattaaagaagttaagcaaagctattaaatcatacgagagcgatattttagaagcactatatacagatttaggaaaaaataaagtcgaagcttatgctactgaaattggcataactttgaaaagtatcaaaattgcccgtaaggaacttaaaaactggactaaaacaaaaaatgtagacacacctttatatttatttccaacaaaaagctatatcaaaaaagaaccttatggaacagttttgatcattgcaccatttaactatccttttcaactagtgttcgaacctttaatcggtgctattgcagcaggtaatacggcaattattaaaccatctgagttgacaccaaatgttgcacgagtgattaaacgattaatcaatgaaacatttgatgcaaattacattgaagttattgagggaggaattgaagaaacgcaaacgttaattcacttaccttttgactatgtcttctttacaggaagtgaaaatgtaggcaaaatcgtttatcaagctgccagcgaaaatttagttcctgtgacattagaaatgggtggtaaatctccagtcatcgttgatgaaacagcgaatattaaagttgctagtgagcgcatttgttttgggaaattcactaatgccggccaaacatgtgttgcaccagattacattttagtacacgaatctgtaaaagatgatttaatcacagccctatcaaaaacgttgcgtgaattttatggtcaaaatatacaacaaagtccagattatggccgcattgtaaaccttaaacattatcatcgtctgacttcattacttaacagtgcacaaatgaatattgtatttggtggtcatagtgatgaggatgaacgttatatagaaccaacattgttagatcacgttacaagtgattcagcaattatgcaagaagaaatttttggtcctatcttaccgattttaacgtatcagtcattggatgaagcaatagcctttattcaccaaagaccaaaacctttgagtttatatttatttagcgaagatgaaaatgctacacaacgtgtaataaacgagctatcatttggcggcggcgctattaatgatacattgatgcacctagcgaatcctaaattaccatttggtggtgttggcgcctcaggtatgggacgctatcatggtaaatattcattcgacacttttacacatgaaaaaagctacattttcaaatctacacgattagaatcaggtgtccatttaccaccatataaaggtaaatttaaatacatcaaagctttctttaaaaattaatttttgagccaaaaataaaccatgcttccataatttgatgttcttgaaaacaataaatttcaaggtatacacaaattttttggaaacatggttttctttttatcatgattaattaaagattaaaatatgacacatacaccttcagatgctacacgagtgttatcacatagcgtaattttacctgtttctttatttctttcgaaaacagttacaactgaatctccttgctcatgagcacaaactaaaaggtcatctgatgaggcaatattaaaatctcttgggaattgaccaccactttcagtaattgttactagttctaagtgttgaccattatcaagaactttaaaaattgcaatgctatcatgccctctattagatacatataagaattgttgatcatgagataaacgcactgctgcaagtttagtatctccatcaaagttttcaggaattgttaaatgacgctcgagctcttcaaatttaccgtcattatattctgcaacactcacagtatttgataattcgtgtacgacataagcaaattttccattatcatgaaattcaatatgtcttgtcccatcactatctttaaataaagattctttataaaattcaaacccgttgtcatcaaatttataagtaacgatacgatcagcacctaaatctgttactgcaacgtacttaccatctggagtttgattaatataatgtgcgtgtggatgatcttgtctttcatgtgtacctgttggaaaatcatgcgcaagttcttgaattagacgtataatttcacctgtgtgcgtgtttaattcatacatacgtatgatgccagcaccatataccgcttcaaataaatatcgtttatcttctgaaatcgatacataacaacctgtaccagcttttgaagacaaacatttatttaataaatgcaattcaccattgtcatcaattttcaaactcgcaacaccgcattgttctccttctttgttgattccatataaaacttcattattacgcaacaaatatgtagacgcttctaattcaaatcctgtttctaataaatcaatacgtgactgattttcgtttaattcaaagcgataaatccctttaccattctttttagtgtaagaaccaatatatccatttgtcattacttttacccctccatgttagtcttattttcattttattaaattttagctagaattaacaatcatttatcatttccttaaagctaaaactatttaactactttaaaagaactatttgctgtgatatgtcattattcgattttaattaatccctcttttttacttacacgagcattaattattaacgcgtttatgcttccacaaaatttttgttgcaaaatagaacacatgttcgtataatgtaattatcagattggggtgaattaaggatgacaagttatgaagaagaaactgattatcgtaacgttccaagagaattactagataacaatatacctatgggaagaggcatgattaaatgggctccttttgcaacattacccgaacaattcgaaacgattcaacaatacattatcgaccaaaacaaaattacacgtcctgtattatcagatgatcaattggctgagctaaacattcggctacacgaggcgctacaatatgcccaacctgtagaagttaaattttataataatggctttgtagattcagtacgcttaaccatttatcgtattgatgctattaattatgaaattgatggttatgtttacaatcagcaacaacgtcaaaaaatttctatctttgatatcttagatattgtcttgttaccttaatgctttgaacataattaaacagattgagtatatgcatataagatgatttttaacatcatttttggatgataggatgttgcgccacgatgatgtctgaattcatcgaattcgctatcaggtattgtttcaacaatttcattaacatatcgtgaaatatcattttgagggattctaacagaagtttctattggtagtgtagttgggtcatgttataatttttatacataaggcacctcgttaatttagtttagtggtatttattaaattataagaagggacccaacacagaaaattcattttattgaattttacatttatgtgcaagttgggcaaagtgtcttattttttaaaagtatttcaaagtaaaattacatgttaatacgtagtattaatggcgagactcctgagggagcagtgccagtcgaagaccaaggctgagacggcaccctaggaaagcgaagccattcaatacgaagtattgtataaatagagaacagcagtaagatattttctaattgaaaattatcttactgctgttttttagggatttatgtcccagcctctaaatgttattagttatttttactttcaatatcagaaataatttctttagtttttctttcaatatcttcaaaatcttttttaaagatataagcaaatgctactacaccaacaccagcaactaatgttgtaatagcaactaagctaaatacgaatttaaacacacatttaataaaattccacatctcaatttcacctctgttaaattaaatacctatctacatttcattatactatcatatatagaataatcattaaataaatacccacttttacgaaatatattcatcaaattatatagtgagcaagctaatgattattttcaaaaatgccgaggaacctctgtttcaacgtgacatgaccttatatgctaatgttaacaatgactattatcgtgaatgctaacttaagattgttatttatgataagatgattttaagtttttaacttaatatccccaccatctataaaaatatgttttaactgattgataagtcttatacaccgagaaatcacctcaaacaattttatatttcatttagtaaaatataactttatttaacatgacattcaatatacatacgattactatttatttacaatatattacaactaaaaagaaaggggccgatgatatgcaacaagtgatatcagatattatgacttttagaggttcacatttcgagttaggtgttaaaactggtaaatggcttcaacaaacacctcttctaaaaaatcgagaaaaagaatggaaaaaacgtgtcccacgtttcgatatagatgtaaatgaaacttatcaaatattccaaacttacgcacctcaaatatgggaagaattaatgggactacaaagtatactcaaaatgccaacacgccaaattattttaaactttggacattatcgttttaccgatttaaaagaaagtggttgcacggtctttcaaggcaaagacttcatggttagaaattatgattaccaccctgcaacttatgatggtcgctacttactatatcaacctacagatagcggtttagctcaaattggtcctgtatcaagggtaactggaagaatggatggtatgaatgagtcaggattaactatgggctataactttatgcaccggaaaaaaccagcaaatggttttgtatgttatatgattggtcgtctaattcttgaaaattgccgaaatgtaacagaagcaatacaattattgaaagaaataccacacagaagctcatttagctacatactgatggacaaatcattgaaccatgcaattgttgaagtgacaccgagatcaatagatgttcgttatgataatatatgtacaaatcattttgaaatattaacacatgaaaatcgtaattatacaaaagaatctaaagaaagactggcgcgtaccatttcacaaactaatgataatttagatatgactacagcatttaagttattcaataatcctcagtatgaaatttacagtaaactattcaaaagctggtctggcaccatccatacatcaatgtatcaacctgaaacattaactgcatattttacattgggagaaaatgcgccaccagaaataatagatttcaaatcatggttagatggtcaagaccttaatatcactcactttactggcaatatagataccgacttaacttttgccaacaaataaataacaccgatattagagaaattatgcttcctaatatcggtgcttacatcctttatttattcaactttgatattaccatcaatcgtataaaattctaaaacattgtcgcttttcccaactttaccattagtaaatgttttatttttaactacgctatcacccgttcccggatttagctttagtatagtgtcttcaggtttactatcatacttaaaacgaatatctccttgtttagtagaagcttttgcatctacttttgatggcatgtttttaaattcaatgtcaccatgatcgtttaaaaatatggattgtttaatttgactcttgtcgatttgtagcgtaccaataacaactttaatattgctatttttaatgttacttttactaatataagtagaactattatttgtctttgaatctagtgcgtcaagatttgagtttttaataactacttcaccgttaatgctttgaatacttgtgttctctaaatcaacatcactgattctaacacttcctgctccagatgatagatttaaacgtttaatcattttatcaggcatttcaatcgttaacgttttcttattctcatgaaaaggattcatatcaattgcatatcctcttgtcttagaccttttatcactaatcttcaacgtcttatctactatattaattaatatatcattgtcaccatcatatttaactctaaattgattcccccgttttatacgaagttctgtactatccaaatttatagatacattgtcaaaagcatcgtctttgaatgttttatcatattgtttagtaccatatttgtttttatcatagctgaaccaaataatggttgctgctgtaaaaaagacaacaaacactaaaagcccaataaaaaagaatttcttcattttctaacgcttcctttgacagttttaatataccaaagtaaatattttaagattaaacgataaatgtattctaaaatcttaaatatgacaatgataaatactaatcctaatcctgaatatgatatggcaaaaaatacattactaattgagtccacaattcctctggatattgctgatgctaataaaataattggacaaaacagcagcaaaagtgatattaaaaataatgctaatacaaataatccaactatagatactggtataaggatgacaaaaatagatagaatgcctaaacttaatgaagcagcaacagctcttgaaatattttcaaatgttggtttagattcagcataatcaataacacttctagcttttgtttcagctgcaacatcttgtgggtcttttaacttctttaaaatttccccttcatcaacgccattaagttcttgctcataaaaataacgttcatattcatacattttttgatctcttaaatgcctaggtagcgcatcaagtgctgtttctaattcatttaaataagtaatcttgttcatataggtcactcatcccaataaaattattcattcgttttttataactttaagacctaaagctatttactaaaaaattcaatacgtttaatttctaaatcttgataaagtaagtttaattttaaatggttatctctatcaatatactttaccgatgagaaatcattgccaacttttgttcttttacatccgaatccaagattttcaatcgcgttatttatcggcgaaccaattcccccatcaaaattagtatgtatcttttcatctcttactaatattatccccttaacgatgttatccttttctctcactttaacggtaagatcagggtgagctttactgttataaaatttaaaacgatcaaacttaatttttttatttacttcatagccttttttatcaaacttctcatttaatttaatatcgtttatttcaagattagacaaatccacagttttcgtatgacgatattgatataaaccaattaatacaccaaaagaacagattaaaaataatataaacacaacccagcgattttgaatacgcactgatgtcaccctttctttgtacttatttaaatatagcataaggtgcttcccgtttcatccttaacaaaaattaacaaagaatttgcaattaatttatttcattaccttttattactataaattggtataatgttgtaaatgctaaaggaggtttttacaatgacaaatttagaaacttatttcaaaaatagccaacccttaaatgaatacattgatggaatgaagacaaatcaagataccgttctcagtatctatcaatcatttgagttaccagaagatgattcacgcatcaaaaaaataaaagagatgaattattctaaagtattagtaattactgaagactggtgtggagatgcaatgatgaatctcccaattctaaaacacatcagtgaagcattaaatttagaagtacgcgtgttccatagagatgatgatacaaaactgatcgatcaatatttaacaaatggtaaatcacgtgcaattcctatcttcgtattcttgaatgatcaattcgaacaagaaacagtttggggaccaagagcaaatgaagtccaaaaatttgtaactgatgttcgtgctgataaattaccgagcaaagatcatccagactatgcagatttagaaaaagaaacacacttagttatatcaaaccgctataaaactgacgcttcattttggaaagcagtttataattccatcctaaataaattagaaaataaataaatttacaataagacaaactttgaggttgggaaaatttaaaattcccaacctcaaaattatttttattaaatgtcttttttagcgacatataagatattcaaaatgaagaatattactatagaacctaatgaaattacccattgccaattgctaaaatcaaagttagagctaatcattttatcagttaagtaagcaaaagggatataatcaaaagcatctaaaactttttcaccgtatcttgggataaatgtaataaaaggtttaataaacggtacaataagtactaaaaatacacctaatgaaaatatcattgctgttttttgtgatgcaagtgtgattaagaataaaaacaagccaaagaatagtaaaaagattaggaagaaccataaattatctacatatttagaaaacgccaaattttttccattactagatgcctgcacaacaatcaaaatcacataatgaattaatgcaaataatattgaaattaaaataattgaaattgttttcgaaataatgtatccaacgcgtgttttaactttactcatatatagttgaattgtaccttgtgaaaaatcacgcgtaattgtcttaacaacaaacattaatccaattattaacaataaccattttgctgcagcaaatacagatccatagacaataatatgtttcgggttatccatagaatttgccataagtatactttgagttgcaatcaaactagatacgactagtatcgctaaatatgttaaaggacttttaaaaatactataaagatcatacttaactaaatttaaaattctcattatttatcacctctttgatttatattgaagtacgtatcacgcaatgaacttttacgtgtttcaatatatttcggataaatatctaattcagataatgcttttagtataacttgataatttttttgtgcattaatcattaaatgtccgtctgctttgtcgacattttgtaattggaaatgctctgcaagatatttttcagttctatcaaagtctttatgatcaacagtaactatcgttgtgtcagatgcaacaccttcctccatgtttacatcttgaacaaaatgtccgtctcttaaaaatacagctctatcacaaattaattcaatatcttctaacttatgacttgatattagaattctcatatcaagttcatttactagagacttaattgtagtcagcacatcaattgagccatctggatccataccatttgtaggctcatccaagattaaaaatttaggtttattcattaaagatactgcaattgctaacttttgcttcatccccattgaatatttcttaactttctttttaatataaggtctcataccaaatgcatctataattttgtctgtgtatgctttatcaaaacccttacctaatacttgtgcaaataatttcaagttatacaatcctgatttattatcatataatttaggatgctcaattaaaaaaccgatattatctgcattatcaatgtctacttttccatcaaatttaataatattaccattcattactttcataacggttgttttaccaacaccgttttttcctattaatccgacaattctactatcgccaaagtcaaaatcaatatcatttaaaacgacatttgagccgtatttttttgtaatatgttctaatttcatcgactgcctcctttaaattttctagtatttattttattgagctgtttaaaataattaacaataagtataacaatgcttataattagaaaaccaatatttaaaatatatgaatataaatctgggaatgatgattgacttagaagaaaataattcaccaacactattgcaattgaaaataaaaatggaactaaaatgataatagtaaacacgtatataccatatggcactttgactctacgcaattctgtaaattgactaaatgcaattggtatagacaagaagttagatatgacaaatgcatatgcagttgaaaaatagattgaatttggttcaatcacatctgcttcataagcatataaactaataacaagcgttccaattaatgttaaaacaatgcatgtaatatagttggcattaagcaattgtttttttgacactggtaaactcatataaaaataatatgaatcattaccacctaatctacgattgagtctaaataagtgaccagcatctaaaatccaaataatcaatattgttggacttataaaagattgcaataggtaaaagaactttgttgagtcaagcattatataaaaaggatataaggttaataatagaacatagatgataagtgtatatcgtcgtaatttaaaattcctaattaacaatgccttcatttaaaaaccttcttccatcaatttgatgttttcatgatatttaggttttctcttttcaagataaaccattaagttctcaatagaaggtgtaatgatattcactttatgacctaaaatttctttaaatacttgcgcatgttctgttaatcctataaatcccgtacgcttatgttcttcataaataagtagagatgctaattcatcatcaaggtcctcaatagcaccactcacaacttgatatctttgtaacagttgttcttttgaaccatttaagataacttcaccgtcacttaagtgaatgatataatcagctattttttctaaatctgagataatgtgtgtcgacatgaatattgttttattttcatcaattaattcttgctgaattatctccaatagctcatttctagctaagggatcaagacctgaagtaggctcatcaaaaatatacaattcagcatgatgtgaaaatgcaactgctagtgataatttcattttcatcccagtcgaaaatgtttttattgatttattgattggtaaatcgaacttttcaagataaaattcaaatacttgatggtcccatttacgataaaaaggggcaatcattttttcaagttgcttcgtagtccatctctcattaaaataattttcagagtaaacaaacccaattctattctttaactctatcggattgagagccatatcctcttctaatactctaataacaccagtttgtggttgatacaaatccataattaaccttattattgtggttttaccagcgccatttctaccaataaaaccagtgacgaatccttgaggaactttgaaagagatattctttaaattaaactgatcacttgaataattaacattacttaattctatggcattcatgatgattcctcctcataaatgaacgttaaaatatcttgaagttcctcaagtgacatttcgatggcttgcgcttcattaaccaattctttaaccaaattttcaatggtaaaaaattgtttctcttttaaaatagaactatcttgctccttaacaaaggtcccttttcctctaattgttgtaacaaaaccgtctttctctaaatcttcataagcacgtttggtagtaatcaaacttacttgaagatctttggcaagttctctcattgacggcaaatgctctccaggagcaacatgtccctttaaaatattttgttttacttgttgcttaatctgttcataaatcggaaaatcactattgttttttaaaattattttcatcaacgtccccctatcactttctgtatatatacaatatacacaatatacacagttttgtaaatatgcatgtctcattatcaaccagtcttcagaaataacactgagtattgtattactagcagttgaataaaatgaaatgacactaccatttaatcttgcattgtctacttcaataaaaaagactgctaaaacgaatgtctttaatctctacgtgacaaccgtagcgtcaacataaacaatcgttttaaacagtcaattctatttactatttttacgtcgatcattacttctacttataaaagcacaaatcataaacataatcgctgctaataataattttataccttggctttcatgattagttgcttgtaaataataaccaataataaataaaataattgcaagtactacaaatatttttgttagatgtttcaatttatttcacctcaacatcgacattataacaaatataaatttttttaataagttattgaatttcaaaagttcaaggtactaatcactttcaactaaaatagcgcaacaaaaccattcaatcaaaatgattattgattgcgatatattgtgttcaatgatattatttaagtgtatccacagaattatactacacaaccccaagtctggtaccagcagacttggggttatttatgtgtgtaggatcattttttatttttccatttcagttctaaccaaagtcgaaaaataattagtaagccacctgtaataagtgtcatcatcccttcttgccaccacatcattacactacacctccgttcgactaaagtatcatactgaaggatgacctacacctattctaacataaaaacagaacatatgttcgtattttggcagcagattttacatattattcgttaattcaccaacaacactttatctttggtataattgaagataatatataggcatacaatttttttaaagagaggttaagcaataatgaatcctttagcccaaagcttaaatgaacaacttcaacagtcaaatgcaactgcctttgcaatgttatctgacttaggtcaaaatatgttttatccaaaaggcattttatctcaatctgctgaagcaaagagtacaacatataatgcaactataggtatggcgacaaacaaagacggaaaaatgtttgcatcatctttagatgcaatgtttaatgatttaactccagatgaaatattcccttatgcgccaccacaaggcatcgaagaattacgtgatttatggcaacaaaaaatgttgcgtgacaatccagagctatcaatcgacaacatgtcactaccaattgttacgaatgcattaacacatggtttatctttagttggcgatttatttgtaaatcaaggtgacactatcttgttaccagatcataattggggtaattacaaacttgttttcaatacgagaaatggtgcaaaccttcaaacatatcctatctttgataaagacgggcattatactactgattcacttgtagaagctttacaatcatacaataaagataaagtcattatgattttaaattatcctaataatccgacaggttacacacctacgcataaagaagtgactaccatcgtcgatgcaattaaagcattagctgataaaggtacaaaagttatagctgttgtggatgacgcatactatggtttattctatgaagatgtgtatactcaatcattatttactgcattatctaatttaaattcaaatgcaatattacctgttcgtttagatggtgcaacaaaagaatttttcgcatggggattccgtgttgggtttatgacatttggaacgtctgatcaaacaactaaagaagtattagaagccaaagtaaaaggtcttatacgaagtaacatttctagtggacctcttccaacacaaagcgctgttaagcatgtattaaaaaataataaacaattcgataaagaaatcgaacaaaatattcaaacattaaaagaacgctatgaagtcactaaggaagttgtctatgctgatcaatatcattcacattggcaagcctatgactttaactctggatactttatggcaataaaagttcatgatgttgaccctgaagaacttcgtaaacatttaattgaaaaatattcaattggtgttattgcacttaatgcaacagatattcgtattgcgtttagctgtgtagaaaaagaagatatcccacatgtatttgattcaattgctaaagcgattgatgacttaagataattaatttcaaccaataatctgatgagtatgactcggattattggttttttatttttaaaattattccttctttcaaagtatcataagatatattttattcagcaacttgtcaaacactatacctaattagttttatacatctctcctaacaaaatcaaaaaatcggacagatgaaaagtaaaaaactttttctatcagtccgatttattatagaaccaatttatataacttttggcaaatcacttcaaacattcaagcatcacatctctacaaatgtaaaaggcaccccacgattgtgagatgccttattataaaattaaagattagaatttaagttcaatatctacctttttaatgtcagttgctttaaatactctttcatctttatactcagtttttaagtctacatattttgacgaaccatttttaaaatacactttatacactgcgcgttcagcaagttctatgtcatgtttagttatcccttgatcatttgcaattgctgatttaagttttatacttaaatcattaattgtaattttgcttgcattatagaacacaaattcatttgaaactatgttttcaaatttatttattgttactgggaatttcacattattagatttatttatttttttttgatttagtgtattgttttacatcaatatctatctttttaatatctttggcactaaataaattaggtgtaaagatgtctgattttaaattcactacttgtttctttccatttttgaaatatactgtatattttgcttgtttcgcaaattttaagtcaagatcactgatgcctctttcactttttaatacagatttcactttgtcatttaaatatttgtaactaattaattgtttattcgaaatttttagttttgataaaattggtgttgatgtgccatttactgcaattgtatatggtacatagctatccgctttcgcttttgaccctgttttaacatcaatatctatctttttaatatctttggcactaaataaattaggtgtaaagatgtctgattttaaattcactacttgtttctttccatttttgaaatatactgtatattttgcttgtttcgcaaattttaagtcaagatcactgatacctctttcactttttaatacagatttcactttgtcgtttaaatatttgtaactaattaattgtttattcgaaatttttagttttgataaaattggtgttgatgtgccatttactgcaattgtgtatggtacatatctgtctgctttcgctttagttcctgttttaacagtaatttcaattctcttaacatctttcgcatgaactaagtttgctgtgtaattttttgaatttaactgtaagattcttttaccaccatttttaaaataaacagtataataagctttcttagcatattttaaatcttgttcactaatacctctatcatgcttcagtactgattttatttgactagttaaatttttgtaatttgtccaaggtttatttgaaaatgaaagattcgataaaatgtttgtagatgtaccatttagattaattgaatatggaacttgatagtttcttttagctttattttcgatatgtttttttgtatctacgttaatattgatacttttaatatcacttgaattgattaaattcgctgtgtaaatacctgatttcaaatctataactttcttcgttccatttttaaaattaactgtatatttcgcttgcttcgaaagtcttaaatcaacatcagtaatacctctatttgattctaaaactgatttaactttaccctctaaatctttgtaactaatattttgatttttattaaatgttaggtttgataaaatgttttggcttgtgccgttcactgtgattgtatatggcacttgaacatttgctttagctttatctttaggttgctttttagtatctacgttaacactgatagctttaatgtcacttgtattgattaagtcagctgtgtagatacctgatttcaaatcgataactctttttgttccatttttaaaatgaaccgtatattccgcttgctttgaaagtcttaaatcgatatcactaatacctctattaaagtataaaactgatttaactttattctctatatctttataactaatattttgattcttattaaatgttaagcttgataaaatgttttggcttgtgccgttcacagtaattgtatatggaatctggatgttagaatgtccatggtgtaatgtacttgatgatttatctaatggcttagctgcggcagatgcttcgttagtattaaagtttgctcctgttgatgctataacgcctaatgctaatgttgttgtaatcaatgacttaaatttcataaattatctctccttttttatgtaattcgtgattgcaactttattatagccagactttctctattttttgaattaactgaatattaataataaattatctttaacaataattttttaacactgttaaaagttcttttaattttgattaactaactaatttacaatacctaaaatgttgtttgattttgtttataccaagtttcaaacttaaatgtcataacaatcttcatttcttaattccgattacatttgtcaattatatttacagcatctttatactcaaaaaacatttacttaaaaatataaattcgatttaataattaatttaaatttagttaatcaattttgcatctattttgttgtaagctatataaaaggagtgataatgatggtgaaaaaaacaaaatccaattcactaaaaaaagttgcaacacttgcattagcaaatttattattagttggtgcacttactgacaatagtgccaaagccgaatctaagaaagatgatactgatttgaagttagttagtcataacgtttatatgttatcgaccgttttgtatccaaactggagacttttaacataaaattacttatcattcaaaaagtaaaacagcataatatcaaggtttataactttatcattatcaataatacctcatataaaataaaattttagggactttttagggactttaaatttaaaattacaagtttaatagaaacatcaaaataatcacatgtttgtgtggaatgtacaccccaaaagctagactgaaaaatctattttttgaggtgtatttttataggtaaatataataaattagagtagacaactcagaattccaattttataataatattgcttgacatatcaaactagatagtactattttgaatatattattataatcaaaaattcattgtaaacttttaaacaaaaggaagtaataaaaacgtgaaatttaaaacaactaaagaatgtaaaagtaataatatctttaaaagaagtcaagaaattaataatagtgaaagtgaaaagggttgtttatggggcattagcatgttgattctacttttcttattgattctgtttggaataactgcttgttcatcaagcattcactttattaattagatttttttacttggaggtatcatgtgaagaaccatacaaatataattaatatcttattagttatagtcaactcattaactcattttctaactctaaacacctcattttttaataattcagcatcggatttctgttttatcataggggctatatttttcttgatcggaatttttgttgcaatatacggtatgaagcgagcaacatattggttaaacttattgattttatttaccaatattttttattttctacacttctgtgttttacttttgttaaaatatataggatttaaattatttatttatgaagggtgtgtattgttatttacctaatttatagtctaattgtctatttcatctgcattataaattttttcataatggccgcaccattcttaatgactaatgctgattatgtatggacgcctatgactacagttacgttatttattttgagtttgattattttcttgatatttataaaaacaaaagatgtcgttcatttaacaattttcatattaaacttacttttttcaatactttattgtttacctatactgttttatttatgaacacttttatattatctagaaaattaaaaccacccttttacgggtggtttttttaatatttactttttagtgcttcgtcaatttcattataaatcttttgaagttgatattttgcttctgacattttcttaaagtcttttgacttaagagcatacattgctttttgacctgaaatttttatagttcgcttataataagtgtttaaacttccagtagctaattcattaacatttagttcatctaataacgattttaattcattagctaacttttcgttttgatattcattcgatgttggcaagcttgtgctagcttgtgcctcatttttatctagattagttactagtggtgatgctaaaacgattgctaaagttcccgcaagtatagattttctaattttcattttttattctccttagtaattagtactaatttattttaatgactaactaaaaaaaagtacattaattattcattaactatatagatcttcttattaaatgaaaattaataaattatcaaattgacataccttattgtatttatagaaaaacaaaaaaaggtaagcaccgaaatgcttacctacttcccataaacaatataacacatatacattgatttggaaagcgcaaaaataaatttaatatactagcccgaaggggagcaatacataaaaaatgaaaggcgctccttgaaaacgcccaaggtaatattaacataaaatggctactattgcattatctaattttatttaattaaaacaaatatatagcacaaaaaaaactagcccgaaggctagcttatgaatagatgaaaatttgaacacattgctgtgtctaaaatgattatagcataatttcaaactattctataataaattaattaacttcatatgaaactttacacactttttttcaaagtgcgctaaaattaccaaaactacttattctattacctgccttgtctacctctcctgtcgctatataacaacgttgtccattattagcaatataagtaatccatctatagccattaatgcaatatgcgccgtcatatttgatcgttgcgttattgggtaatacacctgtaattcttgaattagttgaatagccatccctcacgttattacctttaacattggcaactgtgtaataaccagtctcttttttatacggtacattgtttttatcgagtgtataacctgctggcactggtgaattcttttcatttttagctggtgttttaacattactgatacctgatacacacttccaataaaaataaccacaccatttaagatgcggtgtagcgactgtaatatttctatgttgttgagatatatgtatcgagtgaagggcaaaaaggatatcaattgcaggataagtgttaggttactaggccacttaacaggctatatagttcactcctactatatacacttaattataacataaaaagcaccccgtaaactattatacgggaatgctaaagtcatatatactacgggggagtagtatgaaaactatgctctctatcataagaaaaaaacacccagtgacatgcttgggtgaacaaggatagatgtaaatagttgatgcatgtgtaacacatcatagcaaaaaactagcccgaaagctagctataacatacaatctaaaaagacgtcctttgaatacgtctagaaagattataacataaaaaaataggcaagtaccgaagtacctgcctaaaaaaggattatccactttttcatcctaactgatttctccccataagtcacctaatatctgattaggtggggaagaaccattcgtgcatgaatgagaatttgatgaaagataattttcactacacatattcaatcaagacattgctttctataataaacaactattttgttttatttcttttctataacaacctttgtaattaagttgaatccagggtttttaatatgctctgataaatctgggacaacaaaacctttttctgttatagggaaagacttcgtttcttcttttttcttattcttatcataataagtgacttcgatctttgcgcttggatctaattcaactactctaaactctttatatgctgtcgcatctaatgcccattcgacatagtattcaattttttcttttgtaagtgtagtcccaggtttaataggaaactcgacataatgaggggatagcaattcatttcctttaccatcaactccagtcacatttaccatcaaatacgggcctgttggttcaaaataactcgcgtcatcgccttttttatattttcctttgtcgaatgaacttgatgcacttacctcattagtaattgaagaaaatgagaataataacaataaaacagttaaaaataataaacttcttttgagcatggcgcttcctccaaatataatatatttgtttttatttatctctttttatagctaacacccttatttaagatgataaatatcaacaacttcattttatattgagaaaatattaaaaatcaataaaatattaaaagaaactaaacttacattaaaaaataattaacaaatatttaacattttaacctaagaattaaaacacttctttcacaatcaatctctcatgccatatccactcattatgattgttccaataaatgcgacaccaaccatctataatttcaaacacatatattaatgttccaggcgcgtatacagcctgtccaacatcgaatctatagttagtacgattatcaccgtatctagtggctgaagtagcacctaagccgtcgattttcgcattaaaataagcaccttttgaccatttaaggttataaggcgctttacttccaactgttattttacttgcagatttaccgactgctttttgagcaggtggtttaactttatttgtgatcttattcattaagccctcacttttatacttaggtctaataaagtgagtacagccgtaataattatcccaacgtaactttgcaggcgtatttgcgttaccgtcatagtcctgttccaaaattaaaaattgatttgtattaccaccattaaacactaaaccaatatgaccgtattgtttatatattcctttggtaaatacagccacatcacctatttgtggaacaaacgatggtgtgttttcatatactgttgccatgtttttaaaatcgttattgattgcatcttttgcatttccccacattctaatttctaacaaccaataaatgtaatcaactgctaaatctgcacattggtaaccataccaaccgtcaaaatcaatatatctaccttgataccaacgtaaccttgctcttgcttcactgtatgttttcattattttacctcctagtattttcttcttggttcttcatattctaaagcttggtggctatcacctatacctttagtagtcgggtcttgaatcacaccagttaatactaaaaatcctaatatagcgtttaaaccgtctgttaattgctctgtataaacttgaatatcatacccaatagctttggcgatgttttgagcaaataaaaagatagctgacaatatcgctacccaaaatgatttttgtttcattctaattttccaattaatcatattcttatctccttttatccaaaataaaaagacgaccaataagccgtctatttgatatttatattatggtgtgttaatttatatatagaaaaagggcaacatgcgcaaacatgttaccctagtgagcccgttaaaaagacggtggctattttagattaaagattaaattaataaccatttaaccatcgaaaccagccaaagttagcgatggttattttttattgcttaattcaataagcttgattactagacctatcaatgcaataaggaataaaccaaactgcaacatggtactaattgtaatcattaggcgtctcctttctaaagatttcagtaatgccaccataggcaccacctccttatactcagatagccaccatctatccaacttgctcaaagcatattatagcacatatactttttttactgcttgtaaacttttagattattctcggttcataataatctgaacattacgtggtcaaaactaccatgtttaacttgtatataaatatatatcaatatgcatgttttcagagttaatcgttttattatctctatatattcttaatagtgtatttgaatactgtccttgagcaccaaataaatcgtaattaaccgaaggttctgtagaagtatgaaacacgattaatcccctctgaaccttcccatcaaaaacatcagagttatataaattatatttttcctgtaaataacgtcttgcttgaagatccaactcctgaacagttacatttttcttattcgttttaaccgtttccaaaggtactgtattttgtttaccgtctagccataaattgatcggcacttttttctcttcggtcaatcgattattatcatgtaacgttacaccaccatacatacaagctgttttgtttggtgtaccacccgcacattgataaccataataagcaccatacaagtctacttttttccctttatatttatcaacaatatcctttgaatcaaaatctactaataaatcgttataccacgaatgatctgtaaaaaagcctttaaacaatatagtatgctgtaaaaattgatcgtgactctctttattttcagttttagctttttcattgtaataatagatttgtttaagattgcctaaagctgttccctgcaattcagacttttttcgcaaatctttttcatttatttcttcgcttttctcgctaccatttacaagtggacttgttgtcaacgttagggcaatgaataaaagtaatgtaaatgctgtttttttcattttgctcacctctaaagcataattatttttgttaagtagttatttagttatatacaataattatgaaatgattatcatttaattatacatacatatattactatacactttttatatttgtctataataaaaagatttcatttttactctattatacatttcagatatcttacttacttggtattaacaacacttcccaacttcacttgcagtatgcttcctgtcttttgagctgtgtaataccatgtacgtacctcttttcaatcaaaataaaaagccagtgccgatgcactgaccaaaaacattatttacatttacgaccatacaaataacatgataaccatcttgcccaactcattatgtccacctcccttaaggtaataacgcagtaattgatgcagtaatgactgcaatcataacaattgttacaagcgcccatatggcacctacgagccatttattttgggcgagtgtcttttcttcatttttttgcgcaacatctacttgcgtttgatatctttcttcaattctgtttaatatctttgtttgctctaaattctcatctacaactttatcttgcttatctttaagttctttatgagattctcttagttcattatgatgttgcttatgttcctctctaagttcaagcacatgatcagctgtttcgtttgctagtatttcaacatcatcaacacgttcaactaattcagaaagctctttttttattttctgaatatcatccaaaactacacctactttctaagaaagctatgagcgtaatgctcataacttagtatagttacattgtttcgctatcaactgatttatcagatgacaagtcagttctatccacaacttctttcacaactttcacaccgttttgattgcctgttaattgatataaaagatttaaagtttcagcaatctttttagcgttttcctcagatttaaaatcttgtgcataacttgctgaatcggacgttgtaaaactgcctacaaaatcttgatacaaaacgcgctctgttccctctttgtcaatttgtactaaaataaatctctctgtttttttgataatttcatttgccatattaaatgacctccttaaatttttgtataaaaatagtgccaaggattactcttcctcagcacttttgcttttttcattttgttcttgtatatatgcttttaacattgcattttcttgtgttagtcttgtgatttcttgcgataaatagtgaattgtatattgtggattggcttgtaaaccttgattgctatcattcatttattaattcctccagtttttcgatttttgattgctggtttttaataataggtattaaatgaacccaaagtctatcgtatgcgataccttcgatttctccgttgtcatcataaataacaaattcattaaatcctaattcttcaacctcttccgctattaagccagtatgtcgactaagtttaaaagtatcatcagataactttttaccactttccaattctttagccattatttccgattcatatttgtcaaaccatgtacgaattggaagctttaaaatctcttttgaatgactgaactgatcgtcttcattgatgtattggttttcgattgaaattttatactttttggcagaagtagcacgcccaattgttccagcagaagtaatgtgtaagttagcaggtgctgaataagtacgcttataaatagaattagaagcgactctatcgccagcattatcagaacctaccgccaataaatcataactttgaatgctaacgtaactatttccatctcttcgtttaactaagttgaatttgcccatacctgattcaattgtagtgtctccgcctgtagcatagtcaccattaacgacttgaaccaatcctttattgctacgtttagaaaatcttaatccagcaccgtacttatagttttcatctgaatcaaacatgatataaccgtcagtttcgtatgcactatcagcgtttgataatgtgaatgcgaatcggtttaaaccaggtttatttttggtgttcggagataaatatatcggcgcttctctactttcaatattagctgaagcatatgaatcgataataattcgattgtagtcagatgttaaagcgactacaccgccataagaattgattgttatgccattcataccgctatcactgtaagttttatcccaccattgaatagtaccggatgaacctccgtcttcgccttctccatcaatatatgttgaaataccaaaatgtgacatataaagtgaaccgcctgcggtattatttctaaatcttaggtgaccgtctttcagtcgcgtaaaaatatcgtctgttgaacgtttccctctccaagtacgttgcacaataccacctagttcaatagaatcattctgtatttgaacatatctgttattgtcaccgcctttaattccaattctattaacattgatatcaagaccctctcttgataaattaaggctgttgacaatatcggttttatctactttatctcgcatattttggataagaaggtttatttctctattaccgttaatatcaattttatcagcatttaatctaataccacgtggccccacattcaaagcttgagccactccgttatcatcatatctgattgttgttccatctgtaacattttgaacaatctcgtttaatatatttgaaagtgtacgattggttgcattaaactcttctttagtagttcttaatttgatttccttaccattttgtataatttgagaaccatagcgagtcaatgttttcctctgtgcatctgtgctttctttgaccttgttgtctgtataagcattagctttcttttcagcgtttctagcctttagttctgcgttttgttttgcctcttcaagtttagcttgagcatcttgtatagcgcgttgctcttcttccgaaattttaccatcagcatacgcttgcgattccttctctttaagatcatcttgagcatcaatgtatgattttaaagcttcttgcgcttcttgatttgcttgttcaatacttgctttaatctcaggattattggacaaatcacttaactggtcatcagtatattgtttttgttcttccaatccgtttcgatattcgtttaacgtaactttatctttgatttcaccttttaaagtcgttctctcagcttcagcagtatctaaacgttcaacaataccgtctttgtctgttttatagtccgatgtttttacatagtcacgtaattgttcttttgtggattctctagctgcttcaatagctgatttaacaacattaggttctccgactaactgcaaatcttcattcaccgttaaaccaaattttgttgctattatttccaacgcttctttatatttttcatcagtgtattgtgactgtaataatttaaatctatctgaaatggcgattttgacatcttctacatctgtataaacatcttgtaatttctttctatactcaagaaataaagcttgtgtatctaccaaccgaccaatcgttgcagtttcgggtgtcatagattctaaattatttttaatttgattataaacatcaatcacagcgtctaaacttgcttgtaagtccgctttcaaatcattatctactaagtactcgctattaagtaattctgtagcttctgacaaaagactagcgtgttgtatagataaattaataaaaatattgtttaattcactgaatagcgctttctctcttgttataccacctaatttttcaacatcatttggtgttgcttcaatccatcgaccattccaatatctacgcaagacagcaacatcagggttacttgtatcataccaaagcatatcattgactggattttctggcggtgtatcacttttgtgtattttgcgttcaaagtattctaattcaccatctacaacatctttaactatagtgttgatattgctaatattatcgtttaacttttgatgtattatgttcaatcgcttgttaaactcttctcgtaattctgattctttgaactctttaggttgaccgaatgtatatgtgctattttctgaaattatgttatattcttcggcaataacttctgcctctacatacaatggcgggttaaaatctctatgttttactctgactgtatcaccaattgatataatctcgtgcggatacgtaacttccaaatcagtagaagtaatctcatatgacataactgccgacttacgtttatttaactctgttttggctaaagaacgcaaccgtgtttcattcatattttgatcatctgattgaggttcgtatattccccaaatataacgggtaggtaagttgaattgactttgtgcttcgtcatcagtcacaactaactctaaacgctttcctttgtcattttcgggtcccacagcaattaatgctgttttgatttctgacatatcaatcttcctagttaacccaaccaaatctttaccatactcaatttctttacctttgaataagctgtttttctttttgagtaccacatatctacctttgacggtattagaactaagctctatataaaaatccaataccattttataggttgtacataattgctttaaaacttcatatctagtttgataagaagtccatgacgtagtacgtaagccatcgtattcggtttgttcagaaacttcccaacctgtatcactcaacacatctttcaatgcttctgaagttatctttttctcaaatttgcctggtgcatacggtttagctgttgttatatcagcaagataagacgctatacattctatctctgtgtagccgtccatcgtatcttgaacccagttaataataaattcacgccattgtttgtttgaatcccttataataacacgatgtcgttcacggaacttttcagctctttctgatgatatgagcagttcaagcatttctgaattgtcattaacattacgtttatgaatcgctctaactaaggaagggtcatcagtagaaaggaaatctataatcttgtcgttaaaatctaaaacatgtatcacactctcatctcctttctataaatatctatcttgccatttaaccgtcgtatcaaagacgttttcaggttgtatgattaattcactgtacccagaatcaacattgaaataattacttccaaacgatttctcgctcaacattggttcctcattgatgacaacactttttgcttgcatatctattttcactaaatcacctttttgtataatgacatcccttgcgcctttcggtttcggtagaatctccgtattgaatgaacctaatccattcatctccatccacttataaccgttatacttcgcactatagatagctatgatagaagctggacgctgataaaacttaccgccatctatccactctttctcatccatatcaataggtttacgtctatctgggtctttaatgtgatcaaatttccaagttttaatagaaaatttattacctactcttctgagccgcatataaacaacgattctgtccaagttatacattatcggtttattctgatagtcgtatatctttttggggtctcctttttggttatacaacgtaacaacaatatgtcctatttttctatcatgatatttattttcataaccaatagaagcaagtaacttaccatcactatcataaatatgttgtgctgttcttccggcacctttacctttttgttcaacaatacatttataggtaatttgaaaatctgtcatcgctttagggagccctcgtttcgtgccagcaccaacccaaccttttgcatcaggaaaattagttgctttatatccttcgccaagattggatatcacaaagtcaccaccgaccttaccacctaaatcattacttggaatatcttcagtaatcatcttagtccaacctttgaaatcacgaaactcactatgataaacaggaggcatgtaatccttaacttctttggttacctcatcatcaccaaccataaaataatcttcatcatttttagtgatcataaagtaactagatggtttaattgctcgggcttcaacaattaaaggagtgtcagcagtcccactatttacaactgaaacttggtctgaaatcgcagtatttttatttcctgttactgaatatttgtaagggtctgttagtactactttgatagtgaacttcactgaacctcttgggtttttcggtaattttaatggtccatcaaagtatgcaaaccaataccagttttgagatttgaatttaagttttttcggctttaaattgtcaatatcaaaaaattcaactaactcttccaatatatcgtcatgcgttttttgtccacctggcgccaagacttcatttctaattattagaggtaattcaaattcgatatcatttagataacgagctttagcaatagaacctgttctacctttcacactttctttttcagtaacaaaattaaaagagggtatctcaaaccctctttgtacaactaaccattcaatggttttattgtctatttgaattgtatcttgcattagattatcgtgcctcctcttctaaatctaactcttgtagattcgtgacgctctcgtttatcgatagaattatttacctcatcttcaaacacatacttattaataactggttcgtaatccttatctgcaataacttgattagactcaaccaaactaaccaaacaattaataaccgcatccagtttattctccaatgtatgaatatagtttgtatcactattacttatacttggatttggtaagttgtttggtcgcttatttttagagcggttatcaatatcgttagcagctaaagctaataatttgtgtgcttcgttcgctctacttggatcagtaggtattatccactctggatatccttcttcccctaagtggtacaatccgttatagactttgccaccagtagcatatgcgtaatcaccagcgcgtttgaacgcagctctccatgagcctgttcttggtacccatttacccacaatatatctcatagccgatatagcttgatgagttgggttgagaggattattgtaacccgactttgcgtacgctctaaatgaaggatctatcatttggaacatacctcttgaaggtataccagctcttgcgttgctatcccaattattgactgcattagctgtataattggattcacgactcgcaacacgcatcatctcgttagtaatccaactcgccttataccttcctcctaaaatattttgagcagccttaatagctcgtctagcattagctgcaccattaccaccgggtgtacttttgccgcccccattattctttcttaaccacggtaacgggtctctatgtcttccattccaacgcatctcataatgtaagtgaggtcctgtactaaaccccgtattccccgatataccaacagtctggccgaccctaacttgttgaccagttttaactttatatttagataaatgtgcataaataacttctaaggcgccctttacaattttcacccattttccataaccaccattatgaaaaggcataacttgtgctctaccattaatggttgatggaacaggttcgtaaatgtaatcaaaatccagaccttcatggaatgggcgtccggtttctcgtgtataagcagcagtgtgaccgtataagtaacgtaatttattcatatctaatacaccgccatcacccgactctgcgaaagcatcctcaagccacttgattgcacttttcttaatcttagaccatgcagcttttgttatatcgccagcaatacccatacctttagttagagaactgaaatcaactccaaacgcttgaagtacataatttaaaagtttgcctggattatcgataaagtccatgacatcaccaactttatcgccaagccactttgtacctttacctatttgatcttttgtccagttaaatgccgatgatgcaccggatttaatatctttccacatagtacctatgctaaatcttggaagcgttccatttaacattgaataagtttgtgcgccgttatatacttttgaacctttaggtaagtacgctgtcgtatctgtattaggcgtaagtacccgtttgccattagggaattcaatcatttcatttctgaaaccattcggaccatttccacgtcctttatccccaaccgtagcgaacgtatcccgcgcaatcttaccgttcttaactaatcttgtagtagtatgcgtatgttcagtaccagtgtgtaacttcggtattttgtccatacccaacttaccaccgacccagtttaaaccttcaattaatttattaagacctcttttaacagcgtctaccataccaccgatatgatctttaattttaccaatgatagattttaaaccgtcacgcatgcttccaaagatgttacgcactttatcccacaaacgaccagctatacctaccgtgttatctttaatagagttccagatgtttgacatccaatttcttaatttagtaaatatatctttcgtcgcattccataaacttgtgaatttagaccttacacccgtaaataacgaatgagccttgccgacggtattgcttttgatattattccacgtactagataaccagtttttcatattagtgaaaatagatttaacactattgtataagaaaccaaaaatacttttcgttgcattccaaattgcagataatgattttgtgaaaatacctttgataacaccccagataccggatattaaacctttaagcaatccaccaaagtatctaacaacacctagaatcttacctacaaaccacagttgtattaaattccaaattaactgcacagtgccttttagtatcatcacaataccgtcccaaacacctcgccaattaccagtgaataaacttgaaaagaacttaataaagccaagtattatatttaaagcaccttgtattacacctttgatattttcccaagtgctgacaatcaaagctttaaccgccggccaaataaattgcatcacttgccaaatcgcaaacatgattggtttaataataaagttaaaaataaattcaaaggttgctttaatgaaaccagctatattttgcaaagcttgtgttatttctgagccgttctctttccagaaagaggctaattgagcgcctatctctttggcgaaaccaacgattgcatcaactactttaaagaaagttgttctaatcgtattaactacattttgtattcctgctacagtttcgggtggaaatatcttctctagggtaaccgcgcctttactatcacctttgaataaatcaaagaaaccttgtaacgctagtttagctgctttaaatgcgtttgctacaccagagattgccagatttacaatatttctaaaagtttctgaacgtttataagcttgatagaaagctatgccaataccaactaatgcacctacaattaatgttataggcaacgttaaacttgatatcgacacacctaaaatcggaaatagtttaacaagtgatgcgattttagttcttaaaaacgcgaataaaccactagctttattaacgtttattaacaagggtcctaaaactgtcattgcattccccatcacgctgataaataaaccgaacataaaaactaaaggacctaaaactgctacaaataatccaaactcaacaaccgctaattgaattgacgttggtaatttagtaacccatgtcactactttgctaaaagcacttactataatctttagtgctggttctattctgtcataaatcgttagggctagttcttctaattgcgaccttaaagttcttaatttcccacctaaaccagattccattgtatcggccattcttttagatgcgccggtagatgaatctatagatttggttaacttttgatagtcttcatcagaagcatttataatcgctaatgctcctgacatcgcttctttaccaaatattgtagctgcagaactagcttgttggtcttttgaaagatgtttaaatttttccctcagttggtctaaaagctttcgcataggaatcattttcccattactatctgtaatagatattcctaagcgttccatttcattccccatagctctagttggacttgaaagattggtgaacattgttcgtaacgctgtacctgctttttcacctttgataccagcattactcattaaacctatcgcaatagatgtatcttcaatcgtgtaacctaacgcacctgctacaggagcgacatatttaaaagcttctccgagccctctaacatccgtatttgccttcgagctagtttgtgctaaaacgtccgcaaaatgaccactatcctttgcttttaaaccaaatgccgttagtccatctgtaacaatgtcacttactgctcccagttcttcgccagatgctgccgctaaatccataactccgcttaaaccttccatcatttgcttagaatcccaaccagcaagtgccatgtaatttaatgcttcagccgaatctgatgcactaaattttgttgttgcacccatttcgcgagcctttttcttcaaagcttcaaactcttccccagtagcacctgaagttgctttaacttttctcatactgtcatcgaattcaataccttttttagctgctacagcaaacccagcaaccaccggcgcagttacatacatagtcatgttacggcctacatttttcatactgttaccaatttcttgaagtttaggaccaaaattattaaagttggtaccaagttttcccattgcagtatttaatgctttctgctctctttgcatgtcttttaattcttgtgtggcttggtttaactctcgctcatattggtttaatttagcgtaagcttcattgtatttagcagccgcagcttgtgtctttgcactgttttcaccagtttctttactaagtttgtcataactatctttcagctctttagtaatctgggcttgaactttttgttttttactcaaaccttcgacttttatcttcgacttttctaatgaattatcatatctagaaaattgtgataaattagccgaaagctcacgcgaaaccattttcatttgcctatttaaacctgtcacacctctattgaatccagaaccatctaaatcaacctttatgaccatattacctataggattaggcatttaaaaacctcctttcttccaagatgtaaataaaaaatcaacctttaaaggctgattaaaaaatatctttaaaacttttcgcagttcgctttgtttcaatcttcgattcgacaatgtctaaaaagaagtgtatcggcatgttagccactttttctgcatccatgcctttttctatcaaatctttagctattttcctgtaattgttgtagacagcttcaggtgttaaatcttcttttcttatttctgattctctgtcacgaacttttttgtatcgctaggttccccacctgtaattcgtccaattaactgtccaatcttttcaataccttcttgaccatttggtaatcctttttgaagttctatactggtaaattgattatcaaaagcttcaacgatgaaatccaaaacttcttctaatacttccatttgtacagccatgttgttttcgtattcttcttgcttgtttttgtattcttcctgttctgtcacacttaagttattaaattcttcttctgttagatctttaaaatcagcccccttaaaggctttgttaagtttcaaacctaattttgaaccttgaattgtttcaaacaaagtaataatcggcttcgctaaatacttttgatattgcggctttcctgtttttgtaaatcctgtaattaattcaattgatgtacgttccattattaaattcctactttctttttaatttggccaaaataaaaagagggcgttaagccctcaaaacttacatttctaaattagattgtactgtaatttgcacagtatcagtttgctttcctgcagtcgctgtaacggtcgcattaccttccgccaaacctttaacgaggccagttgatgttacgctagcatacgtttgcccctcagtcactgcataagttactttctgtccagatggttcggttgtggctgatagttgtttagtagcatcaactttaactgtaacttgttcatcagtgacgtttacagaagtgacttcaactttttctgtttttttcatttctttttctacaggttccatattttgttctcctcgactagacatgaattcatcataagttttaccaaatgtttccatgaatacataatcgcgccctgtagtgcttccttttttatcatagccagtaacatgcgagctctcatcaaacaaacgatcaataaaattgccttctacgtcgtcattctggaattcaactttatcttgttttgtttgccctttgatgcttgaacgagtgaatttacctttgaacaagccaacccattctgaagactcatcatgattacgtctttcaaatacaatcgctacatctggcgggatatccttagctccatatttataaccacctacaccttttttagcgccattcaagaacgccttatcgtcagcaggaacagtaacaaatgttgtcttaacacttagtttaccattagatacagcagttgctgcgaccatatcatccccataatcttcctcggtatcttgtggacggtctacttcaatttcttttaagaaacgaatacgtgtgccagctccagtttcccattcattttctgtatcttttaaaataggtgcataataaaagtttgataccccaattgcgatacccgaaactcctgtatctgcaaaatgttgtaagtttaattttaaaaatcttggtgcttgtttcaatttttcaatcatttaattttcctccaatttcattgataaaatcgagccttttgctcttataatatgtctgaatgacatgacgtcactctcgtataacggttctctgtaataacattgaaaatttatcactttgagtaactcaacaattttttctacttgctcgttcggttcatcttgagaccaccaaacatcaatttggtaatggtattctcttgaaatctcgttatcatcagcgtatgtgtcaggattgaacggtaagggatatatgcgaataataggcttgtcagttttttcgtgaaaatggtcatctatagtgtagttaaacacattcacttcatctgtaatgttatttgcaataatagcgtttctaattaatttggtaacattaatcatttttgcaacctcttagcagtatcaagcattgtttttaaaactttgtttttcccttgcttttctgtttttgttataaacaattgtggtttttggtacattgttccaaattctgttgcatgaatacgatgtgagacgcctttagcgtaaccaattgtaacgattttctcacttgtgtgtctgtctgttttcacattagaaacagctatgtgatcgcgagcatgctttttagtattcgcaaaaggtgtattactttttaaaagcgggactaatgacatagccccagctttgacaattacattactatttaaattcatttttaaaactgcatttttcaaaccttgttcgatgttattactttcaattcttgcccccattaaatgaccacctcgccatagatacgcaaataagatttatcttgataatctggctttacatatttgatgttaaatctttgcccttcatgcaagacgtaatgcttatttgttggtttataatcacctcgtgtatctctgataataatagttttaatgaatttgctacctgtattgagattcgtttgagtgtcggattctttagattcttgaatgcaagcgaaacaagagtataatattttcgtcttcggtttcatcggatttccgttcactctctcgcttacatcttcacaaaaatctatacgttcatttaatttattggaattaaatttcatcattttcactctccaaaaattgctcaaatgaacctctcaatttatgcaccgtacttaaaaccatatgtggcgcaagcgataaatccctatccaaataagcaatacggttttcaaaatagtaacttgctaaagggtatatagcacgagcaaatagaggatgacttttaaaccaatcaatatatttacttggttcatccgtaacagcgctagctatttcatggaatgcccaagagtaatatatttctaataagtcgtcctctgaattgtgatctattttgcaatgcttttttaataacttaagttcctcagctgttaattgcattcaatcacctattcttcttttactctttcaagtattactccatgctctttcagctttttgttaacatattcagcacgttttactgtcatttcaacacgtttacctgactttaaatactggcctttttccaagtcagtataagatttcttcacttcatacattgccatagtttatcacctctttataaagtatcgagcgcttattatgcttctaagccaagatcgccttcaccgcgttcactatcatcatattcaatcacaattgctgatttataatctagaattctacagtcttgacgtacagcaatcattaaacattctccgaaatgcatgtagtcagtccatgatgcttggtattgagagcggtcaaataaaacaatcgcatcttttaagttaccgataatcaaagtgttattacctttttgccctagtacttcatcaggtaaaatttcgattttagctcctaataaacgctgttgcgttttttctttaacatctggctggattaaatagtttcctagcttatctttcattttgtctaattttgcaaacatagtttgcgaaacaatcgcaacattatgttcgtaatttggcttaacattcaggttaatagcatctttaatatcatctaaagattttgcttttttaacttctaatttcttaccttctttttcaaaacctgaacttgtagaacccgttgatcctttagtgataacatcaataattgctttgtttcgtgttgctgcaatagttcgcgccatccatagtttcaattcttgcaaaacattcacttttgcatcttcgattgcttcacgtgaaattcggaagtaaccacggtgtgtattaatgtcatatgctaattggaagaatggtttaactgctaattcagggttttcttctaattcttcaactttttcaagggctgcaacttctgattgtcgtactaccggatatttaccagaaccatttgtaacacgtttgaccgtcacatacttatcaagattaaactcaacctcttttaattttaaaatatctgtaacaatttcctctggaataactacaaatcctgagtctgtttttaacgaaccaccttgaatatcattgcgtgtttcaagatattcagtaaaatctctaacttcttgtgatgttacctttgtgttttgaatcgaaatacctaaatcattaatgtttgcttggtttcgataagtacgtgcttcgtttacttccactgattgttgattgttttctgaagttccatctttttcttttagcttatctaattcttcttgtttttcttggatttgagaacgtaaatcagtaatttcttgttctaatttttctgctttttctaactcatcgttattaagtgctctcgttgcatacttcacctttaaatcaatttgtcttttaatgtctgaaatctcagattgtaactcttcttttgttttcatttaatttcctcctaaaattggcataaaaaaatagacatcgctatattcagcatgtccaatggctgtatttgataatggtgttcaacttcaccaaatattatttaatatagagtgtttctttagtcttatttctaattcttttttacgttgttcttttttaacggtttcaatactacgtaatgctggtttaacatcagtgtctttgtaagccggataagtcactacagaaacatctgtaagttcacgaattgctgttaaagtacgtttgtaaatgttttcttgttcatcaaaacgcacttcatcgcctttatcgtcaagcataaaaccaaacgaacattgattgatgttgcctacacgcatgttctcatataaatcacgtgcaaatgttgtgtttggtaacttacaacgatatttaagtccaacatcatcagtttcgagctccaaagtacccgattttgtcctaccaattatttgcgatgggatatgatctactaaacaacgtacatcagataaatcagtgttttctaaagcgcgacgtgaaatcgtttctttgaatccaccaagattttcagaccaagtgtcaaactttaacgcatacccctctatgaccatttcgttgttatcatttgagcgtacctcaataatgttgccaactctcgtttccttactcattttcctcaccacctttcaattttttatcagtagctctcgatttattcatctgatactcatctacaagttcaatatttacatggtttaaatcgactctgtgaatgctaccattaccgcctggtattggcgctaatccatcacgttgtctaatttcatcgatattcatctttccagaatcaatgttaattttgtcaatttcagcttgtgttttttcatcaacaactcgtatttcagtggtatcaaatttaaattcacgattcacatattcatcattaaacttaaaattcaattctgcacaaacgcatgtaatataaggttttaaagttgataagtaatctaaattagcatccgtgatactcatgttcgctgtttctatgccgaacttatgcaatggaataccaaatacacctgctatttctcttgttgatgatttgttttctctgataagctttaaaacttctgtatcaacttctaattgatcaaacgtcattgattcatcgagtacgacaactttcccagcttgtttagttccactaaaacttttgtgaaattcttctctggcacggtctcttgcttttttattatctaatacacctttcattttcaaaataccaccagcatgtgtgccatttcgcaagaaattattaaggaaatcttttccattgttatctgattctatcgtgcgacttaatgtgtctaacagtgacaaaccatttataccatccaacgaataaaatttgatgtctagcatatcctcaaacttaacattacgttctatattatttccgttactgtctatcctttgatgaaaataatacagtcgacctcttgcgtctgatttcaattctatttcggatgtctttctgaacgttaaattcataggttctcctgttttatcacgtgtaatttcaatatagccgtgcgatgttagtaaggcactaacaaacactactaatttgaatatatagccgttatacattgggttaggacgtgtatttaacaaattaacaatcctgtcactataattaatttggccgttcactgtcaccctaattggcatgcgcgccaaatcagaagcaatcatcataactgcagtaaagatgtcgctatgcctaattgcttctatatctttatattgtcgtaattttgttccttgaaaacctggcaaagtttgaaccatcatttgcaaatcatcttcgttgtattgcaagtctcgtttttcatttttataaaaaatccccacaactactaactcctttcttgattgctttcatgatttaaaatcaacgaaataacaatcagtgttataccaatgcataaaagtcctatattttgaccgaatgctttatacatagaaacattaaccacaaacaaacctaataaaaaaaggatgctaaccaaattagcaaccaagaaattaaaaaagacatttattttattcaagtccattttgtcaccacctttaaaatccgaattcttcgctttcatatttctccgtccaattttcttggaattcgtgcattctagcttcagtgaaagctgtgataatcgaaataatcggatctattttttgacgattcatttttttatttattttcacattgtcttctccgtcacgaatcaaaacggcattattaactgatgttgtaagtaacatattatcgttatgctgtattctttcatctgcaacccacattctaaattctttaatagattgtgataacgccttaaaactttgtcccacttcaatgagtggccaatctaaagccattgattcgattgttgttataaaactttgcgcattccaagggtcatagcaaacagcctgtacattcaggtcatgcgtcgttataaatttcactataaaatcgataacttgtttataatcaatcatgccgctatctgattgtgtagtctcagcttctccacgttcaatcgctaattcataatttattttgtctctcttagatttttgttctaagtttgttcttaatccaatgaaagaatgactatgtaaaaacacttttttatcgtcgttagggaaaataaaccctacagatgttaagtcatccaatctcgataagtcgacacctatatacacatctttaccattgatattaggcataggcgttattacttgttcccaatctgaaatatctagcaagctatcttctctttgcgcttgccataaattgaagtttttaatcaaaatcttatgatacgatgtccctttttctaattcgtcttgtatatcagcttttacattttgaagtatagtttttctatgttcttttgattctaaaagcggcattgctttaatccactttgtttcatcttgaacttcttcttgtgaatccatttcagcacaatatacaaagtaattatcagctcttacttcttcatttaaaatacgtttaatatacttatactcttggtacatttgactatttaaattgtctccggccgttgaaacaagtagggttaaaggatttttttgtaatgtcatacctgttttaaaccttgagtacatctcatcatcaggcatacttgccaattcgtccaaaatagcaactgtaggatctttaccatcaaccgcatctgggttattggaaagaggtgcaaacactgaactacttaatacatcttcaatgtctgtctttcttacgtctgttttttcacggataaacttgcttttacttcgcattaggtttacttgttggcttgccatcttgaatattgtttgcgcttgcttataagtagatgaagctacataaatttgtctattaaatttagggtattgtccaaacaacagttcgttaacggacattcccgatacgattagagacttaccttgctttctagccatacttatataagctttagtaaacattctgtattgacctctacgccagccgtataagctcccaacaatgaatttctgaaactccataagaggcatgggctggtttgttttagggtctggaagcatttccacaaatttaattgctttgttagacaaatgattatcccaatggcaaccattcggcgggttctccataaaagataggtgacgtttgcatacttgaatattcttcaaacttgccaaaatttctcctgaaactaccttttttgcgtatttagtaacataatcagtcattactaatcactcacaaattccatatatggatcatcatcttctttttcatcaggaaccataatacgcaatcggctatcaatagttaatcctaaagtattagctgtttgttgcaatcgaatacccgctttttcctttatgttgaacgccggattaaccttttgatttcctttgtcgtcttctaaaatcaagtcttcgcgctctaaaatcaaacttgctttaacaaagtcactataaaaactacaatattgtgctaattgtgctttatctaagttggaaattggcaattcttgcatgtgcggtaatattcttaagtattcttgtttcgctatttcatctaaaaagtgcggtggttcagtatcgattttagaaaatttatttaattgagcttcttgacgctctttttcaataatttcttcttttgtataattcttgttcgaatttgacaaaagcttcttaggtctacccgccataaattagcacctcctactaaaaaaacttaaataaagggaattttttgagaagaaaactctgctccgttctccagaacctttcattgacgcccgtttcatctttgggggacttcctatttttatcttttttaatatttcttcaaatcttcttttgtcttttggttatggcaagcatcacacaaaggctgtaaattacttttgtctaatcttcttgcccaatcaatttttgttggtacaatatggtcaaccatagtcgcttgattgccacaagaaacacaaataaaatcatgttctaacaatacaattcgacgcatgttttgccacgttttcgatttataaaatcttaaatactctggatcgtttcgacgtctcaaatcattgtaattttcatttgcatattgcttgtgtttatcacaataactttcattatgattaatcaatacattacatgttggatgaccacatcgcttcataatagacaatgcacatcactccttgtcgactttcttaacatcttgcacagttacttgtctatcatctttatcattgctaattaacaataagtttcctatcgatccatcaacaagatatttactaccttgaaacaatactttgtctccttgttttataccattgtctaaattgatagtctgattaggtttattcatcaagatagtgttaacactatgaccagctatctcatccaagttaatacctaacacgttagtaagattagctatattccacaatgcttcgctaagttcatttatcataattcctttatctatcggtacattacaaaacatatgctgtttaattagatctgtaacattgcctgtagattgagttaaacctaagccgtaacaagtaatagattcatttaaattcaattcatcattgtgtgtacgtgtagctatctcttggtactttgatatctccattctccacctcttgtttataaaaataaaaaccctcacttaatgtgagagttcaaaataaatataaatgttttgctacatagcaattataataaaaaacaatatgtagcatcaaaattagtccgatgtgtacgatttgtacgatttgtacgatgtgtccgaactgtccgatgtgtacgatgtgtcggtttcttgttgcaagttataaagtatatttactatatcttttactctagaataaaaattgtctctgcctatatcaagaatactcataatcctattatggctttctcgttgttttaacatttgtaaaatatgataatctttttcattcgtgatgtattcttcgtattcatcaatgaacgctatcttattaatcaagtaatcgtactttctaagcgctttgtttttgtttataactttcactaacactttattgctagtcgtgcctttagcttttggcatcgcagattgataaccgtattgtgcaattgatgtactttcgttatcgtagactttactgtctattatatttttcatccacttgtagttatctatcatttcacgtatttctttcctgttatacatgcaatacctccgataatataaattactttttaatatcgttattcattcgctttaattcaatcctgtattcttttaacccgttgtatcctttagttttaactacttcatcaagtagataatcatttatatatctgagcgcttgtatctcccttgcacgatcactattaatactgatacaaactaatagcaatatagcaaatacaatagtcatagtaatccacatcatttaaatctcctcttgtttaaattaataataattctttcttttatcgaagttctgtttattttaaacttttgactaaactgttcttcaaatttatcaagataaagattataatcgtttatttttcgtcggtactctgaagtgataaaactatcaatatgattataagctctattttcattcattttattaattatattttttaaataagatatatctttttgatattcatttataatagcaattgtttccataacaaaagaaggattaaaaaaaatctgatttgtactaaattcattgttgaaactcatcttaaaatcttccattgccttaactctatttgataaattaatcatttgtctaaatccaataacattttcatacgcttttttactttgcttatctaaattattaaagacttcaatatcaaaaaaatctaaaaattcatgctgttctgttggaataatataagctccaatcatctttttagcctttttaaaacaatctaaatatatcggatatatttgttctaaattgatttttttacgttgtaagttagaatctgtaaaatacctaaaaatctctttaactgaataaagcacaacacctcctgctaaagtatatatgcttcctattatttgctcgttcatttttatctacctctttataatattttctgaaaaggaatctataattttatacataccaaaaattcctaatgcatttattatcactccatcatcaataatatatatggatattaagaaagcaaacagcaaaacgatcaaatcataaataaatattctcattattcactcacctccgctcgaaagacgtaatcactcggcgcctctacatcatcattagccgtcatcataatatatacttgctcagttacatacttacctaactcgtacattgctagtaggaataataatcttagtatttgcttaatcatttcccacactcccttatattttcaaacaactgacccactttaataactgcacctcttttaacttgcgcctcgtacctctctttcgctttctttccaatttgcgttcgagtctagcttgttccagtctttctattgttttcttttctctgtactcgcttaaacgcgtaccttctggtgcgtccattgcttcatgtagttcccaaccgtcttttactctcttagaaaccattccagcggttataccgtgactttctattaattccatttcaaatttactgaacctataaggtttatcatttattgttacaatccttgcttttctcgccattttatccacctcttatatttcttctattcgtatgattattttgggctcaattccataacgctttgagctagttatttctgtaatttggttatcgtctttccatacatggccattacaagcatctaataccgttttaattaagttgtcgatatccggcttagtcacttttaattgtccaatcgcttgagctttctttttcttcgaccatgattcaggtggagtaaagtaaaacgctaattcgatttttaatgcattttctagatttagccttggcatttgactttgtaaatattttttatgttttgtatagtttgtaggcatgtatgtgtgtacgtatctgccttttgtgctaaaacgcggtcgaggcgaccccatcggcgcattaaacacttcgttaaatttaatttctatctccatgcaatccctcatatatattcaaataagtttgtttggtgtcctaactccatttgttcattatcaataagtgtatttaattcataatcgtctaaataccaacgacgaccattaaattttgtttcttttattccaacaactaaatgccgaccatctttaaaatgtggtgtaactgaaaacattttgttgccgtcatgatcaaatagatagtatttatcaaatgcatccattttcaatcactcccatttgctatttagacgcttaataaaagcttctctgtctttctcaaggttttcatctacttccgccgttttcgtttctctcgtgccgtctgtgagccatttaggcgttttttcttttgattgtttaacatgaggtttgtatgtttgctttttgctttcaatttgttgcttttcaaatgcacgtacttgttcgatagatttcaagtttgcattaagccatgtattcaaaatgcttttagcatatccccaagtaactttgtttctgtctttagcgattttaagtgatgccgtaactatttcatctgaatcattttcaaatgaatcaagataataatttaaatcgtctaaattgtatggagttatgaaaccgaatccgttatcttggaagaagtcgaaggcagctgccttcttcttctcattattcacattcttttcattattatctttattatcattattgtttgtgttggtttgatgttgttttgatgttggattgatgtttgactgatgttgttttgatgttggtttgatgtcgttttgatgttggttccttccctgctcactttgataaaagtcataattgacaatggttataagggtatattttgatgttgttttgacttctaacattccatcactctcgagtaagtcaaggaaggttttcactttaaatcgtgaccagttaaaaaggtcagacaaggtcaaaatcgatgttaatctttgtcctctttctacggttacaatttggtttccaataggcacttttgcctttgaatgattcgcttccatgagtaaatatatccatgcttcaaactttgaaaatgttctcttttctttaaatagccaatgattttgaattgagcgatcaatacttatccaaccagtcatatacacacctcactttcaaaccggttaaattagaatggtaaatcattgtcatctatttcaatcggacaatttgcattcgcaaacggattatcttttactggtttgttatttgaatattgcgattgtccacgtgtttgttgcgcttgttgttggtataaatcttgttgattatcatctgtgttcttcggttctaaaaattgaatactatcggcaacaacttccgtaacgtatacacgttgaccttccttattttcatagttccgcgtttgtaacctaccatctacgcccgccaacgatcctttagataggtatttattaacgttctctgcttgttttttaaatacgatgatattaataaagtctgcctcgcgctctccttgtgcattcgtaaatgtgcggtttactgctaatgtgaatgatgctacatttacaccactttgagtggttcttaattctgggtctctagttaaacgaccaactaatattgttctgtttagcatttataaacctccaacataaacgggcacgcccgtcactttttgtatttctcttttaatgtattttgcatttgaattttggctacttaaatgaattaaatgtatttcttcgagtctagttaaatcatttgctttcaacattcctatagcatgttctaagctaaaatgagactccataattctatttgctaatgcgctgtgtacactgccgttttttatgttttcttgcatttgttcatagatataattaacttctaacatcatgtgtgtaatgccgttaaatttgtatttcagatacttcgtatcagtaacatacaggatcttataacctagtgtgctttgtaataagaaagccacaggctcgttagcatcatgttcgatgtcaaacggtagaattgaccatgtacctattcgcagctcttgctttgccttaatcgtgcataagcgatgactttcaaaattcatagcttgttgtgttccagcagtcatatagctgattacaccattgtcgacaaactgctttgtatactttgcatgatcaccatgttcgtgtgtgataagacaccctgctatatgtcttgttttatatttgaaatgcttttgaacacgttcaaattttatacctgcctcaagtagtaacgtagtacgtccatcatttaagacgtagcagttaccacttgaaccagttgctattgtttcaattaaaatggctcttcttcgctttctttttctgttgcaggttcttttatttcttcaaagtcagatacatcaataggcttatcattttctaattctgtgtattgtgcttcttcaagaactggttgttcaaagtccaattgttcttgatttgcattttcttcaacttctgcgtccaacacttctttgcgttgacgttgttcggattcttgtgcgtatttgaaaagattgctatctgttgatgtgttgatataacgtttagcagctctattgataactgtttttttagccatttcttctttgaaattattatgtgttttagaattttgtaatgctttttcatctttaatcattgatgactgcatccatgcttgtttaatttgttcaatagtcatgacttcaatatagttatctcgtccatcattaaatacgattgtgcagtacgcaccgataatgttttctttgtcgatgttaaagaagtcttgttcgtgcttaatcgctttgatacgtcctgtttctcccatttcttgcttgaatgtatcgcctttataaatcacttgagcaacaacatcttgagcacctgcatcacgttttaacatcattacattaccgtgatagctacgttgtaactgcattttgttgccgtaaggaataaagtagcattgatttttagctggatttaaaccttgcgttaccatgtctaataaggcatttgctttgcttgtatcgttacaactcattaatttgttatcttggctgatttgtaaccatgcttgtttcatggcattacttggtgaataatcatttggcaattccaaattgccttgtgactctaaaactctcactttgtttaatacgttgtcagatacgttcttttcttgtactaattgttgttcaatagtttgtaatttattattttcagtcattttatatagtctccattcttaattttttatcttgttcatttactatcaattgaatttgttgtgattctgtttttataagctctgttactgattcagcattatcaataaatattggcgctgtaactttaaaatgttttgacagtgtattgatgatatctaagccaacattaattcttgaggcgttatttaaaccgctgtcgtattcgacgccgttaaccgttgttgaacatgtttcttctaattcgccgttaactaaggtattgaatagcttaaattcagcaatatcaaattcgttattgatattttcagtaagcattttgacttttgttgttgtaaattcttttaagatataaaggttatgtgaatacttttctttttcatccaataatctgtcttcttcatttcttaattcagaaataacatcatctagatgtttatttgatttttcgattgatcttgacacttcaatttctgatttttcttgagtaagttcgcttattttgtcatctattcctgaaactttatcttgaatagttttcctgatgtttgagcgtttttgattaatttcatttatctctaacattactgctttgtattcgtcagtttgtgtaacgtcaacgtgagtcgtttttaacttattaattttgttttgtattcttgctgaacgctcttctgcttcgttgattttaatttgaagattattattgtcatcctctaacttctcgatgattggctttattttcttgccttctgaaataatgtgattgatagatgtttgtattgtttctaattctttcgatttgctagcattgaatttctgcaatgctttttctcttgcctcattcacttgttcagctggtaactgttgaccacaacaactacatacattgtcatcaagatattcaaatttttgatttttagctttttctaaatcactttttaatcctttatgattttctaataattgattacgtctattttcttcatgtgcgatttgttgtttgttttgctttaatcttgttttaaggttcgcaaccgttccattttcaacgtgtaactcatttgttaaagtatggattttgttctcattacttgcgctgttattgtcttcaatgcgcttcaattctgattgtttatcagctaattgattacgcaaattaatttcttctgcaccgttttgaatatctatacgctcattttcaagttgctcaatttcttgtttgataattgcgtatctatcattatcgaattcaggtacatcctgcttattttgttgtgtttggttaatacgtatcggaatatctttgatatctttgttaatctgttttatcttgtccgtaagaatctttttctttgtttcaatttcatgatctccaagaatattatttaattctttaaaatcatcatttgttttaatgacatcctcatcattgattggtttagcaatttcaaacaacaaacttcttcgcttcttccaatctagtaagttaaatgcttgagggttcgtaattaacttgaatacatcttcatcaatcagttcatcaatacgagctttataatcctttacttttattgattcatcattgatatattgtttcttcgttcgacttcgtgagtattccttgcgattcgttttttgatttattgtgtatttaggatgtgactcttttttgaaagtcgttatttttccgtcgatttcaaattctgcgaaaacagtcggaattaactcataattttcttcgtttttttcgtttaaaggtacagggttaaatgatttggttgatccgtccaaacctttatcgaaaagcagccattgtaatgcggttgcagtcgtagtcttaccagtcgcattattgccgtatatttttgtgtctttaccgtcaaagttaaagctttcttctttgattccagcaaagtttgatattgttagcttatttatttttatatccatcatcatgctccttttttaatctttcggtgacctcttaacacctcgataattaaattttttattcgttcgtggctgtccggattgatttcatgtatctgtacaagcttattgttcgttttgtaactgtcgtgatagtgcaagaaattaatcgataagtatccgtgatgattacgttcaatttccaataatgctcgttggtttgacaaagtatattcgtcgaataacgttttaaaaatattcaatatatttctttctgtatctctcatgcttatacctaccatctcatgactaagttaattagcctgtctctttcgtctgtgttctcttcaatccattcataaatagattgatttaatatgtctaatgctgtgtatagatcattctcatctgttatatttataccgtcgataaatctatcttctaaatctaagacattcactagaatgctgtaatcttgtttcttaactgctaatttaaaatcgaatccgtctacattaattactttttgacatacatcgccaattttgtagtacattgttgacacttcctttatttcgttttatattgaatatgcattaattttctaattgtttagactgttactcattgccgtgagtaacagtttttttattcttcataaaagtattccttataaaatatgaatgttgcgatacttgcgaatcccgcaatcgaccatgcagtagtgaagtatagaaacggcataagtacaattgctaagactgtaaagcacagtactgctactaggtagcttttataaatgttgctcattttattctctccttatatatttcattgaaatgctcatcgacgaatttattcatctttcttgcgttaaatctccagcgattaaaattctcatcagggtaatgcacaattccttgcgctcttagttctttttcaaatctaggatgaaatagtaatctgtccttgatagtctcatcagatgcaatttttaatttcttctttaagtcactcatgttccatacagggtctaatgaataaccaattagctcatcatattcatcttttgtgataagtacatgtgtttcaggtattggaactgttacgtttaaaatatgtggcatttctatctttcctttcgtgtataatgttgttatctcctagtgaaaggaggtgatattggtgtatattgatcctttaaaaaatgttcgtttttctattaataacgtaattagtaatgttgaaatttctaaaagtatggcaattaaacaatctttaaaacctaagtaccaattagatataattaatagaaacaacataaatttattttctgacttcaaagtagactttcatctaaacaacttaattgaaatgaattttaatttgcgtaattctttttcatctctaacatttcaaagaaatttattttctgaagaaacgataaaatcttttaaggaactctataggtttgatgatgagattgtacttcaagcacaacagaccattagagatttttatatcaatccaactgctatctctactttggctgaagccatcaattcgacctatccaataaatgagcaaagtacctacaagagacacgatgaatttgtcaaacgtatcgaaaatgattttccacatcctttcaaaaagttaataagatggtctaatggcattgcagcaggtgctgacattcaaatctttgtaacaaactatataaacgagaacgatttacatattcaaaattcattgatagttgctatagtttgtttattaagttttttatcgacctattgttcacattctaaaaagtaataataaggcctaatttagttaaccttctttaacaactctgcaactgctcgcaacaattcagggttgttacttctttctaaacagtaactagcatgctttagtaatttgagttttaatttatttttttctttcgcgattctaaatttttgtaacatttgttatgcctcctttgcatttccaaaaatttaatctaacttaaattcttttccatctattaatccataaaagttattttttaaatgcggatgtctttcaagcgtcatttcaataaaacgcgggtctatcattaagtcgtagccatcgttgtattgaatattaacgggtcgtctattaccttcttcgtcatagtagtaatagatgacttttttgttttgagcttgcattgttcgttcctcctattaagatgtttgtttttctcctaaaaacttattaacaaagtattgttgtcctttgcctgttacttttggcgtcttactaattgatgtgtgaccgtccgaatgtgtgattgatgtttctttaatttcgaataactcacgttccattgaatactgtgtaggcatgttataatccacacccttgcgtttaataaggaatccgttttgacgtaaccactcaaacaatctgcgttgcccgatgtttataccgttttgtttaatgatctttgctaactctccaactaaaattgatgtcttagtagtagctactgcatctgcaaatacaatttttggtttatcacgttcaatctttgtttctaattgattgtgttgttagcaatttttaaagcacgttgcataatcatttctggactgttccatgctttctctacttggatgaaatactctctaaaatcaaaacctttttctgtacctgacatcatcgcaacatgtttagctacatcaagtgttaaagcataatcttctagttgtcttacagctccgttattaacaaccgtacttgtaagtacacttgtaaaatccctattttctttgaaatgcttcaagttaatttctgcccaagcgctaaaacgctttttaacttccaaagctttatataactctcttgcacttattgcgatttctccattttctttttcttgtatgttgaacatttcgccgatgttcgattttgtttttaatgcttgcatattgtttatgctcctttcgtgtataatgttgttatcaacctaaggaggtgataagtatggacataatcgcgatttgtatcgcaatttttagtttcttactgactgcacttaaatattatttagactatatgaaagattctcttaacatcgatgttatacctaccagaagctttaattacttggtcgatgacaaatcaagttacaacgatataacatttattaatttcacaaagtttcccatttctgttattgacgttgaatttgatattaaaaataaagtaaatgaacaaaaaacgttcaaacctatacgatataaagataaaaactactccattccatttactttaggaccttatgaaagtgtagaatgtacttttttgctcgaagaatatccagtgatatgggaatgggatgtgactatcaaagtcactaccaacaaaggaatctatataaagcctgttatcatagaatcgcggacagaacaccgagaatcagagccacaagtgacagagttaacatcagcaaataaggtaagtgctctttccaaccccaaggatggttttttaaagaagtttttatatcatttaaaaccttaaacatttaaaatcctccctttccgtcactctttaattggagtggcgttgattttttcgtctaactttttcaatgctaatttgtaaataactgaagcatgttcggttttaaaatgagattcagcaataattttcaatgtttctaatttatttcttgcatcaccgtatgtggtactttctgatagaacaccttctaaaatttgttgaactcgataatctaaaagttttaagtctttattgatgcattgttcgacacactcttctttggttaacgtgatttgttccattgtgtccctccttaagttcatataacatgaactttttctttaaaaaaatataagtgtattttctctaccggtatatctagtagttgtatagctttccatatttcactgtctttccaaccaactttaccgttgagttttaaggataaacttctctctgacaatttcatagcaattgcaaaattgtactgagtgccatacttttctactattttcccgctcaaacgtgagtagtcgtaacacataaaagcacctcctctcaagttcacgtatcatgaacttaactatactttacaccttgttttgaatcaagtcaatacaaaaattcatgatttatgaacttttttgttgaatttttgttcaacaagctttattatgaagttatcaaacggaggtgcactaaatgagagaaaaagtttcaaatagacttaaacacattatgaaaataagaaacttaaaacaagtagatatcattaataaatcgaaaccttatcaaaagaaactaggtatatctttaagtaaaagcactttatctcaatatattaacgacgtacaatcacccgaccaagatagaatttacctactttctaaaactctgaacgttggtgaagcgtggcttatggggtatgatgtagattcttatcgagttcctgatgaagaacgtcaagatgaaacgataatgtcaaaaatcaataacatattttctcaactcacacctccccgccaagaaaacgtacttaactatgcaaatgaacaattggaagaacagaataaagtcacttctatagatggatataaagagtctaaactagtatcgtatattgcatgtggtgcaactggtgctggcataggagaagaattatatgatgacatattgcatgaagaagtattttttaaagaagacgaaacgccatcaaatgctgatttttgtattttagttaatggtgattcaatggaacctatgttaaaacaaggaacatacgcttttattaagaaagaagattctattaaagatggtacaattgcactcgttgtattagatggagtaagtcttatcaagcgtgtagatatatgcgaagactatattaatttggtatctctaaatccgaagtatgatgatatcaaagtcgcttcgtttagtgatattaaagtaatgggcaaagttgtattgtgattaataacgtatatttagcgctttaatataaatataaacaaaggagaaattgacatgaaaaaagcaatcttaactttaagtcttatatttattacctactacctcacttttaaatatatgtggattaaagaattgaagttttaacagcgcctatgtggcgcttaaatataaaaagtaagcaaaggagaaatgaaaatgaataaaatatttagagttctcactgttagcttgtttttcttcacatttttaataaaaaacaatctagcatatgctgatgtaggggtaatcaatcttagaaacttttatgctaattatcaacctgaaaagcttcaaggagttagttctggaaatttttctacttctcatcaattagagtatattgatggaaaatacactttatattcacagtttcataatgaatatgaagcgaagagattaaaagatcataaagtagatatctttggaataagttactcaggtctttgtaatacaaaatatatgtatggtggaattacgttggcaaatcaaaatttagataaacctagaaatatacctattaatctctgggtcaatggtaagcaaaatactatatctacagacaaagtttctactcaaaaaaaagaagtaactgctcaagagattgatattaagttacgaaaatacctacaaaacgaatacaatatatatggttttaataaaacaaagaaaggtcaggaatatggatataagtcaaaatttaattctgggtttaacaaaggaaaaattactttccatttaaataatgaaccttcttttacatacgatttgttttacaccggaactggtcaagcagagagttttttaaaaatttacaatgataataaaactatagatgcagagaattttcatttggatgtagagatttcatatgagaaaactgaataaatataatttaaggagaaaaggcaatgaaaaaattaataagcatcttattaataaatataataattttaggtgtctctaataatgccagcgctcaaggtgatataggaattgataatctcaggaatttttatacaaaaaaagactttataaatttaaaagatgtaaaagacaatgatactcctatagctaatcaactacaattttcaaatgaatcctatgatttaatttcagaatcaaaagattttaataaatttagtaatttcaaaggaaaaaaacttgatgtttttggtattagttataatggccagtgtaacactaaatacatatatggtggaatcacagctactaacgaatatctagataaacctagaaatatacctataaatatatggatcaatggaaatcacaaaactatttctaccaataaagtttcgacaaataaaaaatttgttaccgctcaagagattgatatcaaattaagaaggtaccttcaagaagaatacaacatttatggacataacggcactaaaaaaggagaagaatacggtcataaatcaaaattttattctgggtttaatattggtaaagtaacgtttcatttaaataataatgacaccttttcatatgatttattctacacaggagatgatgggctaccaaaaagttttttaaaaatttatgaagacaataaaactgtagagtctgagaaattccatttggatgtcgatatctcttataaagaaacaaaataaacctattaattatattataatcattatttttcgggtagctcgcctacccttattattttttgccaattttgaggagggaacgcatgaaaacacgttgttacgatggtaaaaaatggcaatatgaatttaagcatgaaggaaaaagataccgtaagaaaggttttagaacaaagcgtgaagctaattctgctggactagacaagttaaatgagttaagaagtggttttaatatagataactatataactcttgaagaatacttcgaaaattggattaaaacgtataaacaacctgttgttaaagaaaatacctaccgtcattatagaaatgcattacaacatatacaaaaacataaaataggtaaaatggagttatcaaagataaatagacaagtttatcagaaattcataaacgactattcaaaagaacacgcaaaagaaactataagaaaaacaaacggtgctattcggtcagctttagatgacgcattatatgatggatttatttttaaaaaccccgcttataaagttaattataaagccggaaaacctacgaagtcagaacaagaaaaattcatctcggtaactgaatatgaaatactaaaagatcacgtcagaaagaagagaactcgttcatcattagcgttattcataatgatttgtacgggttgtcgtgtcagtggtgcaagaaatataaagactgagcatatcaaccaagtgaaaaacactatatttattgacgagcgaaaaaccgatacttcccctagatatatcagtatcgctaaatctgatatgaaacacattatggacgtcataagtacatttgcaattagctatgatggttacattttcaaagaagccggatctataattaaccttcaggctatcaataatgctttgaaatcagcctgtagagtcaataatataccaattattacatcgcacgcattaagacacactcattgttcttatttactagcaaaaggtgtatctatacattacatttctaaaagattaggtcataaaaatatagcaataactacatccgtgtattctcatttgttagaagaaaaatttaatgaagaggacaaaaaaacaactaaaattttagaaagtatgtaatttagggacccattagggactccaaacccaataaatactgttgttacaaggtttctatgtatccaaactgggggcaatataaacgcgctgatttaatcggacaatcttcttatattaaaaataatgatgtcgtaatattcaatgaagcatttgataatggtgcatcagacaaattattaagtaatgtgaaaaaagaatatccttatcaaacacctgtactcggccgttctcaatcagggtgggacaaaactgaaggtagctactcatcaactgttgcagaagatggtggcgtagcgattgtaagtaaatatcctattaaagaaaaaatccagcatgttttcaaaagcggttgtggattcgataatgatagcaacaaaggctttgtttatacaaaaatagagaaaaatggtaagaacgttcacgttatcggtacacatacacaatctgaagattcacgttgtggtgctggacatgatcgaaaaattagagctgaacaaatgaaagaaatcagtgactttgttaaaaagaaaaatatccctaaagatgaaacggtatatataggtggtgaccttaatgttaataaaggcactccagagttcaaagatatgcttaaaaacttgaatgtaaatgatgttctatatgcaggtcataatagcacatgggaccctcaatcaaattcaattgcgaaatataattaccctaatggtaaaccagaacatttagactatatatttacagataaagatcataaacaaccaaaacaattagtcaatgaagttgtgactgaaaaacctaagccatgggatgtatatgcgttcccatattactacgtttacaatgatttttcagatcattatccaatcaaagcctatagtaaatagtgctcaactaactaataactcgcttcgttctaaaaggtcgaagcgagttatattgttaaaatttgaattgacttacattttaataaaatcatcttaacaattttaatttttcattaatacaagtctttactctacactcaaacaagattcatacactgcacatcataataaatctatctattcaaatataaataaaagttacctactacattctatgtagcaggcaacttttattacttatttcttttcattatcattaagtacttttacaaacttcacattatgtgtcttccaatcaacttcatataatgctgataatttttcttcttttttatctacatggttttcaccagaccaatagccccagaaaccatgacgattccaatctattttaaactcatccattgatcttttataatgaacaacaaattttgatttaccttcatcttttttatcatgtgacataacagctaaaaattctggattaaacccttcagaaacagttacaggcatcttattcttaggagtaaaattatctttcgcccataaatttccatttcgtgttaaagaaaagatttcacttttagttctattatcactatcattagttaattgtctcgtatggtcatgtcccatattatttatcaaatgtgcttctactttccaacctacacctttatgtgacgtagattgatcaagtaatgtacgatacgatggttgttgataactaatcgtctctgaataattactctcttttgtaatatttccagttaaccctccacgattaatcgaaaaatctccacctgttttataaccatacgtatatttaacttctcttgattcatcctgattttttggtgcaaagtcagtcacatttgtattgttgttgtcatcaacattttgaattgaaactgaataagatccaggccatcttaatgtactattccaataaccatttgggtctagaattcttaaaccactacctattgttcctttcgctttaataaatactgtttctttatcataattaggttcagttaagaagttaaattgtaagctttgagtaatatttttttgactatcacttgttgtagctgtacgtgtatacattttagtatcaccatcaagattcttctcagaaacagctttaatttcagaattaatttttgcataagaagtagctggtaatacagtgaaagtagtcgatagtgctaacgtacaaattgtgatatttttatatagttgtttaatcatttgtaatccttcccttcgattttatccttctctaaatgatttattatcagagtatttatcaacgactttaactgttttatttttccaatcaacttcataagtgacaattaatctttgaccttctttatttttttctaaaattggaggtgcataatgtattccaggtctgtttttcaaaatatcttgatttcgtgtgtatgttacttcaaattgcgttttctcatttgacttttcattagataaataagttaaaaattctggattaaagccacttcttactaatgctgggtatctatattttgaagcaaagcttagttcagggttttcaacagtagcaattctcgtatttctatagaataataattcatcatttctatttttcacttctccaccatacttcaagtcattcgcaataactgaccagtgtacatgccagttattatttttaccgctggcaattgtgtcataattttgctgattataactaatcgttttggagtagctatttgatgaagttcgtccaatacctttcgttgaatcgaatttaccacctgagctatatgaaaatgtactgtctactttcgcagttgaaattttatttttcggcaattggtctaatatttcagttttaggatttctttttacttgaaaatctacatggtactcacttggatactttaaccaatttgaatttttttcttctttatgagattcaaactttaaatttgaatgaattgagccttgttttttaacaagtaatacattcttgtcataagttggatcatcgataaagtcgaattgtaaattttggagtatatttgttttctcatcatatacagtttcagttcgttttgtgattttaccgtttttcccaatatcatcaggtactgttgaatttttatctttattagtaacattacgtttctctttttgttgagacttatcaacatgttctttcttattttggtcttgcgagtctttatgagctgaatttgcttgagtcgttgctgctgataacaataaaattgcacatgataatgatgacgctattaaaacacgttttttatttttcattgttataaccttctttcgtatgattgatatttgttgatatgtatcgacatgtgaataatatcacaaaaatagagaatatatatttaactatttattaaatgattttgttaatattattaaatactttatcctctttaaaaataatgtgtgtacaaagtcattaatttagtaaatatttttatttagtagttaataaccatcgatttgaaatttatatataattattagctaaataatatcctgcatctttctcatacaatttactataaaattaagcatacccgatatcagtgttaataagatcgttgatactagacagttaatttcatagaacgaaatcaaataacacgctactttctgcattttaaattatgtttaagaataaaaattatgtttatataaatatatatactactttgaaaaggtgtgagcttaatgacaacttttagtgaaaaagaaaaaattcaattactagcagatattgttgaactacaaactgaaaataataatgaaatagacgtttgtaattatttaaaagatttattcgacaagtacgatattaaatctgaaattttgaaagttaatgaacaccgcgccaatatcgttgcagaaatcggtaacggctcacctatactcgcattgagtggtcatatggatgttgttgatgcaggaaatcaagataattggacttatcccccttttcaactcacagaaaaagctggcaaattatacggtcgaggcacaacggatatgaaaggcggtctgatggctttggtcatcacactcattgaattaaaagaacaaaatcaattgcctcaaggaacgataagattactagctactgctggcgaagagaaagaacaagaaggtgccaaattattagctgataaaggctatttagacgatgtcgatggcttaattattgctgaaccaactggatctggaatttattatgcacataaggggtctatgtcatgtaaagtaactgcaactggtaaagctgtccatagctcagttccatttattggtgacaatgcaattgatacactgcttgaattttataatctatttaaagaaaaatattcagagcttaaacaacaagatactaaacatgaattagatgttgcgcctatgttcaaatcattgattggaaaagaaatttctgaagaggatgcaaattatgcatctggtcttacagctgtatgttcgattataaatggcggcaaacaatttaactctgtaccagatgaagcttcacttgaatttaacgtaagaccagttcctgagtatgataacgactttatagaatcgtttttccaaaatatcattaatgatgtggatagcaataagctttcactcgatattccaagcaatcaccgacctgtaacaagcgataaaaatagcaaattaattactacgattaaagatgtagcttctagttatgtagaacaagacgaaatatttgtttcagcgcttgtaggtgcaacagatgcctctagtttcttaggagataataaggacaatgttgatttagccatttttggaccaggtaatccattaatggcacatcaaatcgatgaatatattgaaaaagatatgtatctgaaatatattgatatttttaaagaggcttccattaaatatttaaaagagaaataagaacgatgctgtcagctgccctattcgcatgctggcagttttttattgcgaattttaagttgatagaaataacgatgaatattgtttgaatgtaaatattcaaatatcaacaagcacattttcattgattaagtgatgtaaaactgaaattattgtgctgatttgtcatacatatattgactaatggtcatataaaaagatagcttctaatagttacataaaactcgtaaaaaccttctcgtaaaaggaatgggacataaatccctagaaaacagcagctcaacgagctgtaaattatcaaatacatttgaaaaaagctgatttctatcaaataatttatagaaatcagcttttttacattgtctaagaacttaatgtctctgtctctttggaactttatatttcataagtactattttattgtttaaccttttttttaaataaggtataaatctacaatatccaaataagccccatcgattcttataatagtcaaaataattatattcatgtattactcttattgtatttggtaaaatttcattcaatttttttaaatcattgtaaccatatttaaaaacaggttgtgaggataactttgataccgattgatgtctctttgtattattcgcaattgtttttgagcaaaattcaatcgcaaatgtcaaattatgatctcccatctttttgataatagtgtccaataattgagtcattacactctcatcaaaatacatcaatacaccttcaataataaacaatatatctgacttactattaaaaaatttataatttttgacatcatcaatccaactgtaatctagcatagatttagatatcatcttataactattactttctttaaaaaatgtttttcgtatttctattgattctggtacatctaaatctatccatgatattttttctttattaaatctttgaaaccttgtatctaagccacaacctatattgaccacgattaaatctttattatccttgataagcctcttagtaacacaatctattatcacagtacgtatactaattccaatttgagacatgtcatcacatgtaacatttttgtacatatcatctaaaccatcaaatatttttttagatagtgcgtcttttattattggtttttcgttttcgtactcttttgctcgagctatcaaaggaattaacattgattcgggaattccaaccagttgcttcatttaatcactccttaaaaacattagtaccaatgcataagaaaatttttacaacttatttctattattttttatttaaaatttctttttttaatttacttctcaaatgttctaatgtaataggatctgtgaaccaataatcttctgctttatatgaaattacatgtcctttttttacagcttcaatattctgccatgtatgtgttttttcaaaatcaaattttccgtacgaaggtttacttaaaaatatataatcaccagcatatttactaatattttcttttgaaatggaagcatagccttttttatcttcttgtaatttatctttatattgctttgtcattggcataccgaatgcatcatgaacaatatccaaaccacgaccccatgtagagttatatatgtatatttgcttttcatctggttcaaacacagatgctgttgcttgaccaattttactttgaatttcttttttatcttttctagttttatcgtcccactcttcaatccattttttagctttatcttcattattagtcaacttgcctatttcttttaatatttctttatgattgtatttattgtatgtatatgggattgttggcgctattttttggtatttttttatatttttatccatagcatctacaacaattaaatctggttttgctttagcaactctttcaacatcattttctccaatataatcaaccccttttaaataaggttttaaaattgaagaatctttagttatatctgaaacagcaattggtttgattcctaactttataaaatcaccaacataaaatccagttaatacagcaactcttttaggtttctctggtactttcagtgtttcaccattttcaattttatagtctgtagtctttgtcgagttacttgttttatcgacagatgctgaacacgcagtcaaaataaataaattacataataaaattccaattaatcttttcataatatcatccttttgttttttaattgatattcattttcaattataaaatattaaaagaattagtcaacgcctgttagtaatacacatcagtaacatttctattttcatttatgatattatctaattattaatttataatataaaggagtatgcaattaaaatgaacaaagtccacaaacctttatatttttatttaatgctattcttctctacaactatcataggtgcacttttattgtatttacctttcactggtaaaaagccaatatcttttttagatgccctatttatagcttcaagtgcatttacagttactggcctatctccagttgatatagggtcacagtttaatatacttggtgaaatagtaatactattattaattcaaataggtggtctgggtatcgtaaccgtaaccctattgacactagtatttttaaatagaaagatatcaatgaaaaatagattcttgattatggttacatggaatattgacgaacctggtggtgttattaagctaattaaacacttggctatttatagtttagtcactgaattaattggtatgatttgtttgtgtttatcttttataccaaaatttggtataggcaaaggattatttttaagtttattcacatcagtatcagcttttaataatgccggatttgccctttttaagaataacttaatagattattctagtgatccaattgtcattattacaatctcaatactcataatatttggaggtattggacattttgtcgtaatagactttattaattgtaaaaaattgagtaaattatctttacattctaaattagtcttaactacaactagtatcctaataattataggagctattacattctttttattagaacagtttaatactatgcaacatatgggactagttgaaaaaatcggaaattcttttttccaatcagtaacaacacgaacagcgggttttaacagtatagatatagcaagcattaacaaatctaccgccttaatgttaatgctacttatgtttattggtggtgcccctctcagtgcagctggaggaattaaaataactacttttgcagtggcgtttatatttgttctaaattatatacgtaaagaaaataatgtttcagtattcaataaagaaatatctgacaaacatataaaactatctattgttaccattaatatctcatttctatttatcagtatcattacttttatattatcgataattaatccgaacatatcattaatcaagttattattcgaagtggtttctgcatttggaacagtcgggttaagtatgaaccttaccacagaatatcatggtattactaaaataattattatattcgttatgctttgcggtaaagtaggactattaactttattaagaacatttataccaccaaaaagtcctaaaaattaccgctacactaaaggacaaatttatctataaaatagcttatccatctttaacaagaaatgaactagtgttttaatctattacattaaaaaaactacctaaacaggtagttttttatttattttaggcccattaaatgtcttatgtctttaattaagtaaaatgcacaagtacacctttaaaaagatttactcaaaactaaactatacctagttaaccgcttgtgattaagaaattttaaatgtggtttcttttaattatgtcaaccacccataaggattttaatcaagcactcattcattcctgcactcgcaatatgcattacttatagaagtggatgcactctcatattatggcaataccataactcccgcaccataatgatttaaataccattatgaatctcaattacaaattagcacataaaaaagacgcctcccataagtctagtcaccaaatggaaaacgtctcgtaattaaaatatatttgcgtgcattctaatttgtacttagaatacatcatactcgttcataatgtaattttctaattagtcaaaactatatacagttttacatcattcccggcattatgcactaataaaaacttactttaatacacgctttaaagattattaaatcagcgttttaatttttagacaacgctattatttttagtttttcaattctattatgtcataattatgtcactcaaaaactgttttccaacattgatttattgttggaaaatctcgaaaatctagtccatttctccaacaatcgaagaattatgcccttttttctccctttaaataagtcataatacgaggcatacatgcaacatttacaataaaatatgttcctacatcgtattatacgaatgctcacacttatagttgtttagtaaacccagatgtattgctaacatacccattatcactatatagtttatgtgcagatagtctttcatttctattaccactatttagtgttattgctttacaattcaaccgtttagaaaattcttcagaatcagctaataatctctttccataaccttttttcctaaattcagaatgtataacaaacgcaaggattctcatatactctgcatttttttcgtaaaacatcattttacacataccacttaaaccaattattttattttcttttatcaaaagcagtaggaagtaatcatcatgattcgttattttctttagtctcttttttaaatcattctcatttgttggataacctagatcatcatataatttacatagttgatttaatttttcaaaatcactgttattaaacaatcttgtaattatgctcatataacccaccctaaaaatattatgtacctattgttacatacaatagatacgcaaaatcatttctcactgcaaatcaggacgtttctcagcgtaaacaaatcattgctattcttttgaaaaatatctgcatatcatcacagtaattttataacagattaataaaattaaaaaaaacataacaacaagtattataataaatattataatagctatcgtattaaatagtttagaatatgcaaactgaaaaataaaaatcacaattaaaatactaagtaatgtaaatggtaatagcatcatcagatctttaacattatttctttgttcttgctcccaatcgctaatagccctaaaactactttttttatctataggcgatgtaaaaataccatatattgaaggtgctatacctcctaaaatagcagttcccaaagttgtcattactgaaattactgcgaaagtatcatccgaaagcaataaattcaaactaatgcattgtttattacccatcgaatttattgaccaaatagctagagaaataaacaacccaaaatttaaaataaatgatatagtaatagcaattgttgacaaaacacgaaatttttcatttttatttatattatccattttctccctttttcttaaatcattttattatatattacaataattaatctgaaatgttgatgtaatttgaaaaaaatatcatacttttactcctgaaaacctccctaaatcatcaatatgaaaatcagcattaggatattgcgtttacaactcttttaaatctcactcattcttctcatcgtcttaaccgatactatcaataaatactggcaacaccataaaatatatacccaatttataaaaacctaattgactcataatcttctaacggtatatcatccacaatcacagtatgattaggattatcgttagatacatctttcactgccttatctaacccctcatcacctccgtcccattcaccaatattaatgaatataggtacattaccgtttatatcatgcttatctgtaaataatttatgatatttacccaacatttcacgagcttttaaacgatcactaggttttattggtacctctatcagttcaacatgttcattatagactaattgtactttgccactttgtggattttctttatattctccacgcttgactacaacttctttcgtttctgtttcatcaccgactgtcgcattcgttagcacatgtaataactcttttgcggttaatacattctcatctataatcttatctttttgttcttgtatatattgcttgatgtgcggctttttcaataacctacacgctgtcacatgtgcgctatttgcgttatatcctgcttttatggcactttgtgttacattcagtgttctaatatactcattcacaaaacgtgcttgctttgcagttaactcactcattttatcacccccacaattttatctaatatggtttcataccataatattacagattgttctgaacaatctaaggcactactaatatcttgataactaagtccttgtataagggagtcaaaaatataaaactctttatcggtcgctaatctgtcaacaatcatttctatgtgattctttataatatgatcattgacattatcgtctgtcatcaattcgtcagaatcttcatcacctattaaaaagaaatcatcagtatttatttcatcatcgccccgttaactagctttgaagtctttagcacacttgcatataccggctgtcgtgctggcgagatactagcattgaagtggtctgatattgattttgaaaacaacacgattagtattactaaaacatattacaatccaaataataacaagaagaaatttcagatacttccccctaaaactgaaagttctatcggtaagatttccgttgacccaaatgtaataaaggtgttgcgtgattataagataaacgttcaaaataattggaaaaacgaattatataatgataaccattgtaatgaaaaaactatcaatgtggatacaaaccattatgtcacgtaccagcatactcaaaaatatctctacgcactcattcagatacacacattgcgcattgctcatagaatcaggtgtacacattaaagaaatacaagaacgattacggcataaagatatcaataccactatgaatatctatgctaaaatcacaaattcatacaaaaaagacgcctcccataagtttagtcaccaaatggaagacgtctcgtaattaaaatatatttgcgtgcattctaatttatacttagaatgaatcatactcgtgcataatgtaattttctagttagtcaaaactataaacagttttacatcattcctggcatgccacccatgttaggttggtcattatttttttctggaattgatgctacaaccgcttcagtcgttaagaacattgctgcaacacttgctgcatgttgtaatgctgagcgtgttactttagttggatcaacgatacctgcttctaacatattaacccactcgtttgtagcagcgttaaaaccaacacctggttctgcatttttcaagcgttcaacgatgacagagccttctaatcctgcattttcagcaatttggcgaactggtgcagttaatgctttaagtacaatattcacacctgtttcaatgtcgccttcagcttcaatttcacttactttttggtaaacatttactagtgcagtaccaccacctgcaacaataccttcttcaactgctgcacgtgtagagtttaaagcatcttcaatacgtaatttacgttctttaagttctgtttcacttgctgcacctaccttgataactgcaacaccgcctgctaatttagctaagcgctcttgtaatttttcacgatcaaagtcagattcagtttcttcaatttgagatttcaattggctaacacgtgcatcaatgctgttttcgtcaccgtcaccatcaacaacagtggtattatctttagttacttctactttacttgcagtacctaacatatcaattgatgcatcttttaaatctaagcctaaatcatcagtaatcacttgcgcaccagttaaaatagctaaatcttcaagcatcgcttttctacgatcaccaaaaccaggtgcttttactgcaacagctgtaaatgtgccacgcatacggtttagcacgatatttgttaatgcatcgccttcaacttcatcagctacaattaagattggacgattagattgaaccacttgttctaataaaggtaagatatcttggaaagacgagattttcttatctgttactaaaatgtatgggcgttctaattcagcaaccattttatctgaatcagtaaccatatacggtgattgataaccacgatcaaattgcataccttcaaccacttctagttcagtgtttagtccatttgattcttcaattgtaatgacaccatcgttacctactttttccatagcttcagaaatataacgtccaatttcttcatctgctgctgaaatcgcacctacttgcgcaatttcatttttattttcaactttttgagaattttcatgtaacgcttcaacagcaactttaactgctttgtcgataccttgtcgtaaaccaactgggttcgcaccacttgtaacatttttcaagccttcttgaatcattgcttgagctaatactgttgcagttgtcgtaccgtcaccagcaatttcatttgtcttatttgcgacttcttgaactagtttagctcccatattttcatatggatcttctaattcgatttctttagcaatcgttacaccatcgttcgtaattaaaggtgctgtaaactctttatctaatacaacattacgtcctttaggaccaatcgttactttaactgcatttgcaagttggtcaacaccacgtaacattgcttgacgcgcatcttcagagaatttcaattgtttaaccataaatgataaacctccatttgtttagtcatatttcattttcgttctttttaatttatctatgaatttagttttgtattattcaataactgctaaaatatcttcttcatttaatactagatatgtttcattatctcgtttaacttctgtaccagcatattgttggaacacgacacggtccccttctttcacttcaggagtcactcttgtaccatcatttaatagacgtccagttcctactgcaacgataacgccttcgtttgatttttctttagcactatcagttaaaacaataccacttttagttgtttgttcttgttcttttttctcaataatcacacgatttccaattggttttagcatgattgttcctccttaaaaaacctaaagtttagcacttaacattaaagagtgctaacatacatttataataatcaaatttggtcaaaatttcaagtcataaccttttaattaagttttgtaacttcaagttatttacgataaaataaattataaacaaatatttggaggaaaattatgacaagattatgggcatcattgctaactgttattatttatatattgtctcaatttttaccgcttctcattgtaaaaaaattaccatttgtacaatatagtggcatagaactgactaaagcagtcatttacatacaacttgttctatttttaatcgccgccacgacgattattttaattaatttaaaaattaaaaatccaacaaaattagaattagaagttaaagaacctaaaaaatatatcattccatgggcattgcttggatttgcattggtaatgatttatcaaatggtagtgagcattgtattaacgcaaatttatggtggacaacaagtaagtcctaatacagaaaagctaattattattgctcgaaaaatacctatatttatcttctttgtatctattattggtcctttattagaagaatatgtattcagaaaagtaatctttggagaattatttaatgcgattaaaggtaatcgtatcgtggcatttattattgctacaacagtaagttcattaatatttgcattagcacataatgatttcaaatttattccagtttattttggcatgggtgtcattttttcattagcatatgtttggacaaaacggcttgctgttccaattattatccatatgttacaaaacggatttgtcgttatattccaattacttaatcctgaggctttgaaaaaagccacggaacaagcgaattttatatatcacatttttattccataataaaaaaaacgaatcacacacggattatcgtcgctgtgattcgtttttatttttctttttatttcgctttacaaataagaatagcatgattgaaaataccaccatcatagaacatacaattgctagccaacttttactatatgcagttgacgcacttttcttattatcttcttgttttttaactactgtaaaatcgtctttttcatgcggttcaaatgagcgttgttttgaatccggcttatcttcgggctttttcaaatctggcattgatccaatttcaccagtaattaatgcgagtacttgttcatctaaattacgatagtacctttctgatttcaatggattgaaatattggaatctaaagtaattcgattgctgttgtaatccatttaaatatgcatttccgctgaaattttgttttcgaataatattataaatgtcttcatcagtaacttctccataatctttgcccaacttattaatttgatttaaaatatacggattatacttgtaagccccatttgccaaggctaaaaatcgttgggatacaaaatcattaccagtaggattttgtgagtttccttgattcccatttggttgccattgaccttgattagatccatctgaagcatttgggttccatgtccccccatttttcgagccaccagaatgattggaatccccaggttgatcgggatctggtgacgggttaggatttggcttattagggtctggttttggattcggatttggctttggtttatctgggtctggttttggatccggttttggtttcgggttatctggatctggtttaggattcggacttgggttttggttatttgggtctggttttgaatctgtacttgggttttggttgtttgagtctggcttcacattattcgaatcaggattagcatcacgactattcgaacctgttccttcattacccgtttgatttgattcgtgaggtgtcccagtctcattattattcatttcactatttactgatggtgaagttatattatgattcaaattagtagttggtttttctccatttaagttatcctttgcttcaactgtgtgcgttgcaagccctaaactactactacttaaaattaaaatacttgttgaaagtaacattttcttaaaccaatgatatgacatttcacgagacacctccctttttcatgtaagtattaatctaagtataataaatatgcgttgaaaatgcatttatatttggaatttgaaaatgaatattaatattcttgaaattttcgtaaatattgctttacaagtacgagtataaattttatacttagtctattaagtattctttactaaagaaggagcaataattatgggcttatttaaaaaagataaaaaagcaatgacttttgacaatgcaatggaagaaagacgttcaatatataatttgaaagattcgatatcaattagcgatgacgaattagaatcaatgattgcacatgcagttaaacatgttccttcatcatttaattctcaatcaactagaattgttctcttgttaaatgacaacaataataaattttgggataacacaaaagcaattttaaaagaagtcatgggagagaatcgtgatttcgagccaactgaacaaaaaattgataacttcaaacattcatacggtacaattttgttttatgaagatcaagatgttgtaagtggtttacaagaacaaatgccaaactactatgataattttgcaatatggtcaactcaaacaaatgccatgcatcaatttgcaatttggactgcattagctactaaaggcataggtgcttcattacaacactataatccacttgttgatgagatgacttcaaatgaatttaatattcctaaaagttggaaacttattgctcaaatgccatttggtgatattcgtgaagctgctggcgaaaaaacatttaatccagtggaagatcgtttcgtaataaaaaaataatcaatatattgttaggaatgggacagaaatgataaagaatcattagttattcattatgtagtagttcttacacattagccgctgctaatgtgcacttaagaataggaatacatgagtaaaactcatgtataagaaatactaatttctaaagaaaaagtatttctttatgttagagcccaccccaacttgcattgtctgtagaaattggtgttccaatttctctatgttggggccccatcaactactgtcaatataacattgtagagcctaggactttgattttatgtcctgggctcgttttttgcgtttcaacataacttttagtaagttatatataagatctatcaaggatgtgatgttatgaaagtccaaatttatcaattaccgattatttttggagatagttctaaaaatgaagctcaaataacgcaatggttcgaaaaaaatatgaatgctgaagtagatgtagtcgttttacctgaaatgtggaataatggctatgatttagagcatttaaatgaaaaagcagataataatctaggacaaagtttttcatttattaaacatttagctgaaaaatataaagtcgatatcgtagctgggtcagtttctaacattagaaactatcaaatatttaatacagcttttagtgtgaataaaagtggccagctaattaatgaatacgacaaagttcatttagttcctatgttaagagagcatgaatttttaactgctggcgaaaacgtagctgaaccctttcaattgtctgacggtacttatgtgacccaacttatctgttatgatttacgttttcccgaattattaagatatcctgctcgcagtggtgctaaaattgcattttatgtggcgcaatggcctatgtcacgtcttcaacattggcattcattactaaaggcacgtgcaattgaaaataatatgtttgtcattggaactaatagcactggattcgatggtaacacagaatatgctggtcattcgatagttataaacccaaatggagatttagttggagaattaaatgaatccgcagatattttgactgtagatttaaacttaaatgaagtagaacagcaacgcgaaaatatacctatatttaaaagtattaaattagatttgtataaataagaagcgcccgaaataataattaacacatgtcatgactaaacatagatttatgagagatttttcataagtctatgtttatttttttatagtagataactcagtaagaatccatttcgccctttgcaaatgaatgattttcttaattaaattgattaattttttgaccttttccaacattagacttattcatatattttaacggtggatctcataatgaggattaactcttcccttctttattacaataaaaaggccgcgagcttgggaggggctcacgaccatacttattattaagggaatgttttacagttattttttcaatctatttttggggatgttattaattatgaaaaaaattttatttatcaaataatgataaatcgatgttgtttacgatagcttacatgctagaaataattatctgtaatgataattaagaaaaatacatagcactgagtccaaggaaactaactctactagcaaatgttactcacttgctaattttacatggttattaagttgggatggcttaataactcatacttttagtactatacgaagataacaaatttacaatgaaagtaattaattattcatcttattttttagtgaatttgttcactgtgtcgataatccattttactaagtcactgattgttgaaatgatatcttgtgccattgaaatcactccttccttaattaagataaaaattcttaaaattaaacaactcatcaactattttccatcacatctctgtgatctagttatattaaaacatgctaaaagcatttattttccaatttttcttaactagtcgttttttattcttaactgtaaatttttttatgttaaaatattaaatacaaattacatttaacagttaagtatttatttcctacagttaggcaatataatgataaaagattgtactaaatcgtataatgacagtgaggagagtggtgtaaaattgaattattttgataataaaattgaccagtttgccacgtatcttcaaaagagaaataacttagatcatattcaatttttgcaagtacgattagggatgcaggtcttagctaaaaatataggtaaattaattgttatgtatactattgcctatattttaaacatttttatcttcactttaattactaatatatcgttttatctaattagaaggtatgcacatggtgcacatgcaccttcatctttttggtgttatatagaaagcattacactttttattgtgctacctctattagtattgcattttcatattaatgaaacactaatgatgtttttagcattaataagtgttggagtagtgattaaatatgcacctgcagccactaagaagaagcctatcccagcgaggcttgtaaagcaaaaaagatatttttcaattataattagtacaattcttttcattatcacactttttgtaaaagaaccatatacccaatttattcaactgggtattattatacaagctattacattactaccaatatactattcaaaggaggactaaattatgaaaaaattactcaacaaagttattgagcttttagttgactttttcaacagcatcggttacagagccgcgtatataaattgtgattttttattggacgaagctgaagtaccaaaagaattaactcaattacacgaataactataagagaaagtgtgatagtaagtggaagcattaaatgattataattacgttttatttgtaattgttcaagtttcattaatgttctttatatctgcatttattagtggaataagatacaaaaaatcagattatatatacattattggaatagtgttatcttcagtatatttctttgacaaaatcggaagtatttcactagttgttataacaatttttataataatttttctctattttaaaattagactatattctgtatttttagtaatggttactcaaatcattttatattgtgcaaatttcgtttatatcattattttttcatacattataacaatttcacacagcgtgtttatagttctaccaatctttttggtagtgtatgtatcaatttcttatgcacttgcctacattttaaatagaatattaaaaaggataaatggtacatacctttctcttaataaaaaattccttactgttataactattgttatagtaataacattctctttgttatttgcatattcgcaaattgatgcgagtgatgcatcaacaatcaaacagtattcgcttttattcttgggaattattatattactgagtatcttaatttttatttattctcaatttactcttaaagaaatgaaatataaacgtaatcaagaagaaattgaaacctattatgaatacacattaaagattgaagcaattaataatgaaatgcgcaagttccgtcatgattatgtcaatatcttgacgactctttcagaatacattcgtgaagatgacatgaccggtcttcgagactatttcaataaaaatattgtacctatgaaagataatttacaaatgaatgctcttaagttaaatggtattgagaatcttaaagtacgtgagattaaaggtcttctaacagctaaaattttacgtgcacaagaaatgaatataccgattagtatagaaataccagatgaagtaactcgcattaatttgaatatgatcgatttaaatcgcagtattggtattattcttgataacgcaatagaggcatcaagtgaaattgatgatcctatcattcgagttgcatttattgaaagcgaaaattcagtaacgtttattgttatgaataaatgtgcagatgatataccacgtattcatgaattgttccaagaaagtttttctactaaaggtgaaggtcgtggtttaggtctatcaactttaaaagaaattgctgataatgcagacaatgtcttattagatacaattatcgaaaatggtttctttattcaaaaagttgaaattattaacaactagccataaggatgtgaatgtatgaaaattttcatttgcgaagacgatccaaaacaaagagaaaacatggttaccattattaaaaattatataatgatagaagaaaagcctatggaaattgccctcgcaactgataatccttatgaggtgcttgagcaagctaaaaatatgaatgacataggctgttactttttagatattcaactttcaactgatattaatggtatcaaattaggcagtgaaattcgtaagcatgacccagttggtaacattattttcgttacgagtcacagtgaacttacctatttaacatttgtctacaaagttgcagcgatggattttatttttaaagatgatccagcagaattaagaactcgaattatagattgtttagaaactgcacatacacgcttacaattgttgtctaaagataatagcgttgaaacgattgaattaaaacgtggcagtaattcagtgtatgttcaatatgatgatattatgttttttgaatcatcaacaaaatctcacagactcattgcccatttagataaccgtcaaattgaattttatggtaatttaaaagaactgagtcaattagatgatcgtttctttagatgtcataatagctttgtcgtcaatcgccataatattgaatctatagattcgaaagagcgaattgtctattttaaaaataaagaacactgctatgcatcggtgagaaacgttaaaaaaatataataagataataaagtcagttaacggcgtattcaattgtaaatcttgttggattttaacaagataactagcaaatgcactgtatagctggctttttaattgtttaataacaaaattaaatatgacgcgtgaattaaaaaatgatgtaacgtttctttgtatacctattcctattactacataatttatcaatttctatttcactctacaatcctatggcgcaatttttaacaaaatatactaaatttgaaattgacagtttccataaataaaatgctacaatttcctaccccgtgaatcttattttgttttaaaaaacagtgtagcacaagattcaacttgtttcctacactgttttataaatgaattatttaaaatgcttgttcaacctcttgtaatgttggcaaactattaatagcaccatacttcgttgtcactattgcagcaacgcgattgctaaacgctaaaatttcctcaccttcattttcaaataactgagttaaatttaacacatcggttgctaaaatcctgctaataactgcaccaataaaagcatcccctgccccagttgtatcaacaggttttaccttatagccactatgataatgattaataccattcttcaaatatacggcagcaccatctgctcccttcgtataaatgactacagtgacattacctgtaaataatgattgaatggcttcattttcatcatgaatacctgtaataaattctaattcttcatctgaaacttttacaatatgtgccaatggcaaaaaggtatgaatagtttgtcttaaatcttcagcgttatcccataatggcaatcttacattaggatcaaatacgacagtaccatttgcatttaatgttttggtaatcaattgataatgtgcatctctcatcggactatcgaccaaatcaacagaacaaaaatgtactacatcattttcattcacatcaatatcattcacaaaacttggttcaaataacatatcagcagagggcttacgataaaaagaaaaatctcgctcgcccgcttcagtcaaactcacaaaagctaacgcagtgtttgcttcattcgtgcgatacacttttgatacatctacaccaatacttgatatcgtttcaataatgctatctccaaatgcatcattacctaattgtgtaatcatatacgcttgttgtcctaacttttgaactgtacaagctacattgcatggcgcgccaccaatttgcttcgtaaatgtttgaacatcttttaaattcgcatttgtaatatttggaataaaatcaattaacgcttctcctattgaaaatagacgtctcatttatgttcatcctttaaatcatatttagtaaattgtaaatatacttgccctgattctgttgatgttttaatacctagtgcgtcttctgtcgggaaaattcgagatgtcaaaacacgttccccatcattacagaaaatttctatactagatgtatcaacaaaaatttgtaattgctttaatggcgtgtctaatatcgtactacgcgtcgtaccttcaacatttgtcggcaataaaccactgtcgctgcgatctaatgttattttattttcacgcttgttataagcgattaatgttgaagaagtcttagatgtacgtaattcaaagtacacttcggtagcatcattatccaaaatatctatgattaattcatactgtttaccttcatacggatgtaattttcgagtaaatttatttgcgtagcctaatgctgtctctttattgtgacgtaatttttccaacgctggatatggacgctgcttaagttgaccattttctacatttaatacacgaggaattgttaagcaatgggcccatccttcattatcagtaggatattcgatttccggtaaccccatccatccaattagtactcgtcggcctttttcatctaaaaatgtttgaggtgcatagaaatcaaagccattatcaagctcgacaaaattttcatgttcatatgttaacttttcaatatcaaactttccaagtatataaccactttgataaatatttttgaactgatcgccttttggttcaataccttgtggacaaataagtatgacatcttgattatctacattaaagtaatctgggcattcccacatatatccaaaatcatccaactctgtatttatttcacctaaataatgccaattaattatatcttcagtattataaagtaataatcgaccttgctgatcattattttgtgcgccaatgatcgcataatatttctcactatatttaaaaactttaggatctctaaaatgactcgtatatccttctggttgttggctaattactggctttggaaacttttcaactgaaccgtcttctttcaatcgtgcgatcatctgactcgcatgtcgttgccaatgattatctcgatgatttcctgtgtacatataatataaatgcccgttatattcaaaagcgctaccgctatatacaccatggctgtcatatttagtatctggatttaaaattggcccttcagctttaaagtttattaagtcatcactcgtgtagttataccaatactttaagccatgtactgcgcctaatgggaaccattgatgtgaaacataatacttccctttataaaaaattagtccgttggggtcatttaataagcctgtttctggttgtatatgaaattgttgacgaaattttgattgatcaacttgttgttttaatgttttaaaatactcagtatcaacgtcctcgattcgttgataacgttcttctctagtccattcggtcataatatttacccagtcctccttttataatttatgctgttaacaatttatattctattatagcaaattttacctacgttctttaacttttaacctatccatttatagttatatggtatcggttccacatttattttaaaaaatacagcgtctaaatattaacatctactgtgacgctatatggcatatcttgctttttaagcatctgttgtatctcttccatcgcgcattggccagcttcaaaataattataatgaattgtttttatcgatggagacactaattgtgtcattgggtcaccaccaaaaccatatatttgatgtggtttcataacatcttttttatcagaataatatttataggcagctaatgcaatcgtatcagttgctccaacaaccgcatctacttgctccacattttccaaagcatttgcaacatctttttgtgcttccacataagtaaaatttgtttcatgtatattaggtttaatttggtatttagctaactggtcaagtaaaccacgttttctatgtataccaactgcaatatctttttcacttacgctaaacacttcaacttgttgatatccctgttgaccaatccattcgcctataatttgacctgctttataatcatcatgcacaatactatgaagttgttcatgttgttgaccaacaataacgattggtacattcattttattaatgacttcaatatgtctctctgttatatctgtagccattaaaacaataccatctactttactgcgtgctaatgtttcaagcgcttgtatttctgcttcgatatttaaacctgtataatttaaaattaattgtgattcatatttttggcattgttttgccaatcctttgattgtttcgtctactgcatatgaattcattctaggtataatggcaccaataaggtgtgtttgtctcgctcttaaactttgagcaaattgattcggttgatagtcatgttctgctataattcttgttaatttttcacttgtttttttactgacagatccattatttaaaaatctagatactgtactttttgaaacgcctgccaatttggcaatatcagatatatttttcatacttattcacctatcattatttgtgacacttagccttattttagcatatgtgtaaccgctttaaataatatttctgcttctttcataaaaagatttcaaaataaaacttttgtataacaaaatgtcccaacatcaacctttagttaaatgtcaggacaatgaatattctatgtaaatatattctaatatcgaatatgtttattgaatctatttagctcaccttcaaagtaagcatgttcaccgtgaacaatcttgtctaatcctatattcgtttcttgttccgtaacagataatggtgtaattaatttaattactttcgcaataataaacgtcatgacgatactaaaaattacaactgctgttacacataatatttgtacaagtataatatgtatgtcaccagtataaataaaaccattttcaatgtcaggatttgcttttttactttggaaaactgctgttaaagcagcaccaataataccaccaacaccgtggataccaaatgcatctaatgcatcatgatattttagttttaccttgatgtaattaatgacaatataacaacagatacctcctattaaagccattattgttgcactaagatatgttacatatcctgctgcaggagtaatgacaactaatcctgctaatgcaccgagtaaaagtccaagtaaacttgtcgtctttttaaaaatatattctaaaattaaccaacctatagaacctgcactggctgaaatgacagtatttgtaaatgcaagcatcgcaattttatcaaatgtaaaagcactacctacattaaatccataccaaccaatccacacgaatataccgccaatcaacgtaatgataagattatgtggtgttgattcagaatgtttgtttccttttccaatcataatagctaatactaaaccagaaacacctgatgtaatatgaacaaccgtacctccagcgaaatctaatacaccgagtttgttaatccaaccgccgccccaaacccaatgtgctactggactgtatacaagagcagtccatattactacgaataataaataaggaataaacttcattttctcagcgattgaaccagataaaatagaaattgcaatcgtacaaaacatcatttgaaataacataaacaaagcgaaaggaatatgtgggctaatatcttcttgagtcgcaaaacctacatgattaagaaaagtatattcccaatttccgaaccataaattcccattcccaaaactaattgtaaaaccaactgttatccatacaaatgtaacaagcacaattgctgccatactttgcatgacagtattaagcgcatttttagattgaactaacccaccataaaataaacttaatcctggtgtcattagccaaactaataatgtacacaaaaacataaatatcgtatcgttaagattcatacttaccactcccttgttttcataataatctgacaatttataaaaagcaaaaatgcgttaagttttattacatcttttgggataaaatgtgccacactatataaaagtgatttcatgaactaaaacaaaaaagactacttactcacttttaaattagcggaagtagccatagaatctaacatctattttattgttaaaatgataacgttaaactttttgaattgtaattgtccatgaagcattatcaatttgttcatagtttgttacaggatatccattttctgctgcccaatttggaatagcttccgtcgcttgcgtgcaatcaaaatcaatttttaattcatctccagattgcaatgttgccattttcttttgcgcttcaattaacggaaatggacataccattcctactgtacctaattcgtgtatcataattatttctccttttccaatcacttttatttgatcaacatcatttgcataataatcttctatactatttgcgtttgctgtttaacctttgcagattgttgttgtacttttttcattggacgaacaaagataaaatgactcattgtccatacaccaactatcattgatgctagcgcaatccatccttgccaagtcatcgttgctgtttcaaccaaaccgttaccgatagaacaaccaccagcaactgacgcaccaaatcccatacatatgccaccaatagcactgtttcgtattgtaatcttatctggcaatcgccatttaaattctcttgatcctctagctgcaatatatgaaccaatgaaaattcctagaactaaaaagacaccccaatcaataaatttagtttcacctgtaatcaaaaagtgtactaaatttgctgatggcgttgttatacctaaaccgtcatttcttccagttgatgcactcattggccaagctaagagtgcgataagtccaattacaattgctgcaataaatggatggtatcgtttttcgaaaaggtaatatctaatacctgtataacgttgctttagttttggaacagcaactcgaactttcttattattgagtgttcttacaactagaaaaatggtgattatagttaatataacgactaatccccaaaacggaatgccagttgtttgagacatatcactatttacattcgttggttgattaattttatccattactggctttaaaatccctgttttagtgattgctgcagtaacagcatataatactaatgcaatccaactaccaattagcccttcaccagcgcgataccaagtacctgttgcacaccctccagccaatactattccaattccaaaaataaaagaacctataattgttcccaatattggaaaactatgtgcaggaatttttaaaatatctgttgccgtcaaaatcaataatcctatactttgaatagtaatagcgattaataatgcatagaacatcttattattcttttgcacatacatatctcgaaagccacctgttaaacaaaatcttgttctttgcatgacaaaacctaagagtcccccgacaattaagccactaaaaatcatccacataatcctaccctctcatttccgataagtttagtatgtattataggtgatgattttcttgttttcaaccttatacacaatatttttgatatttatattatattcatataaggaaggcgattaattacgattcatcgttatatctctacgtgttaatttattaacctatactatatttatcagcacaacagtttttcctttcattttcaaacataacagaaaaagcctgagacatacttagtcccagactgttctataattaattaaagatataacaaggttaatcattcaaagctaacatcacatttattcactgtaatttttcataaagaataataatgactgtaattctatacctaagtcaatttgatgtacttgcacatctgaaggcgtattaattctaccaggagtgaagtttaaaatacctttcacaccagcttggacgagttcatctgcaactttctgtgcaactctttctggtgtagttagaatcacaacatctatttcttccttcttcaatgttgttattaattcatcgttatctttaacaataacgttccctattttctggccaataacatcttcttttacgtcaaacgcttctgtaatcgtcatatcgtcatgtattgaaaagttatatgtgagcaaagctttccctaggttcccaactccgacaattgcgattttgatcatgtcactctcgcttagttcagatttaaagaaatccaataaactatctatattatatccgtacccttttttacctaattcgccaaaatatgaaaagtcacgacgaattgttgccgagtcaatttgtaacgcatcgctaatcgcttttgaatttacacgatctatacctttagattttaatgaactgacaaatctataatataacggcaaacgttttaaagttgctcgaggaattttaacttggtcactcattcgctatttcctccttcgtgtttgaatgaattatatctatgtattcaaacgagttagagcgtaattgttagattattaaaaaacaaataattgattacaatgaatacctaaatattatacattattgaattttaaaaataaatatcttagtttcaagacggcgttttatactgtaaaatggttattaatgtaataattacgacttttttcataagttaataaaatttgagaaagacgaaaggtgaagatcgaatgatacttttacaactcaatcatatatcaaaatcgttcgatggtgaagatatatttactgatgttgattttgaagtaaaaactggtgaacgaattggtatcgtaggaagaaatggcgccggtaaatcaacattgatgaaaattataactggcgtagaaaactatgattctggaaatgtgtcaaaaattaaaaacttaaaactaggttatttaactcaacaaatgactttaaattctaatgcaacagtttttgaagaaatgtcaaaaccatttgaacatattaaacgaatggaaagcttaatcaaagaagaaacagattggttatcaaaacatgcaaatgattacgatagtgatacatataaaacacatatgtcccgttatgaatctttatcgaatcaatttgaacaattagaagggtatcaatatgaaagtaaaattaaaacagtacttcacgggttaaattttagtgaagaagatttcaataaacctatcaatgattttagcggtggccaaaaaacacgtttatctttagctcaaatgctattaaacgaacctgatttattacttttagatgaacctactaaccacttagatttagaaacgacaaagtggcttgaagattatctacgttattttaaaggtgcaatcgtcatcatcagccatgatcgttactttttagataaaatagttactcaaatttatgatgtggctttaggtgatgtcaaacgctatgttggtaattacgaggaatttatacagcaacgggatttatattatcaaaaacgaatgcaagaatatgaaagtcaacaagcagaaataaaacgattagaaacttttgttgagaaaaatattacccgtgcttcaacaagtggaatggcaaaaagtagacgtaagattttagaaaaaatggaacgcattgataaaccaatgttagatgccaaaagtgcaaatattcaatttggctttgaccggaatacaggtaatgacgtcatgcatgtaaaaaatttagaaatcggttatcaaactgcaattaccaaacctatcagtatagaggtctctaaaggcgatcatatagcaatcattgggccaaatggtattggaaaatcgaccttaattaaaactattgctaatcaacaaaaagcgcttaatggcgatattactttcggcgcaaatttacaaattggttattatgatcaaaaacaagcagaatttaaatctagtaaaacgattttagattatgtgtgggatcaatatccgttaatgaatgaaaaagatattcgtgcagttcttggtcgtttcttatttgtacaagacgatgttaaaaagataattaatgatttatctggtggtgaaaaagcacgtttacaactagcactacttatgttgcaacgtgacaatgtacttattttagatgaacctaccaaccacctcgatatagattcaaaagaaatgttagagcaagcactccaacattttgaaggaacaatactatttgtttcccatgatcgttactttattaaccaattagcaaacaaggtatttgatttaacaattgatggcggaaagatgtatttaggagattatcaatattacattgaaaaagttgaggaagcggaagcgttgaaagcgcaccaagaagaacagtcagttaacgtacaagcacatgaaaagtctatggaacaatcgtcgtatcataaccaaaaagaacaaagacgtgaacaacgcaaacttgaacgacaaatatccgagtgtgaaaatgaaatagaaactttagagactactatcttacaaatagacgagcaattaacccaaccagaagtttataacaatccacaaaaagcaaacgaattagctatccaaaaacaagatagcgaacaaaaattagaacacgctatgtctaaatgggaagaattacaacaaaaactataaaaatatacataactctaactgtaaaatcgctatagttagagttatttttttacaaattttaaatttttttattcacaataaaaacgctgatattatagctatccacagagttatcctagttatccacaagtaaattaacactaatcaatcatttattttctgttttcccacctgatatccacaataaatgacgttatcaacaccttttatccacaagttattcactctttgttgataagtacacatgttctctattgacattgtttttatcaaaattcattgttaagacattttctttatgaaataataataatattgaagtatatttttattattattaaaaataaataaggagatacttatgagcacaaatcaaacatttttaatatttgttatagcaattattccacttacatctgtaataggaattgttggacgatacatgagtcgtcaacgtctattaaaatctatggaaacattatggcaaacgatttctccattagaagcttttatcagaccgaactcacatttcgactatgagtataagctctacaaggaaaaatttgaatcacattcattagttgatgataaaacttggtccgacttaaatatgaatgcaatctttcataagatgaattataatttaacagctattggtgaaatgaaactatatgcctgtttacgtggaatgctttcaattacgaacaaatcattacttagtttatttaatgataatgctgaatttagaaaaaacgtaacatatcatttagctttgattggtaaaactgtttatccaacatttccagaccaaatcacacctgtaaaacgtcaaaatatattgtttctatgcccgtttttaccagttatctcatttgcagttatatttattaattcacaagttggtattttattatttcttatgagttgcctatttaatatcattttatcagcaactttaaagcgtacatatgaggatgacttaaaatctatcttttatgcatccaatgttttaaaacaaggctatactatctcaaaaattaaacatgctccacaacctgaagtcaattttaagcaatttagaacagcacgtcatttaacgagtgttttagctgaagttaatgatgaagatatcggagctatggtaattaaactagttaaacttattttcatgcttgattatgttttatttcattcaattcaaaaaagctatacaacacatatgaatgagcttaaaaattgtttcgattacatagctgaattagataatcattatgcattagcaatgtatcgtagaacgctagaatgttatactgaaccacaaattgatgattcaaatgatggcatagtattctctgagttaacacatccactcatagcagatgcagtagccaatgatttctcactatcacaaaatatactgttaactgggtctaatgcttcgggtaaatcaacatttatgaaatccatagcaataaacattattcttgcatcggctatacaaacagttaccgcaagcaaatttgtatatcaacctggaattgtgttcacgtcaatggcaaatgccgatgatgtgttatcaggcgatagttattttatggctgaattaaaatctattaagcgtattgttgaaattccagataatcaaaaaatatactgctttatagatgaaatttttaaaggtaccaacacaactgaacgaattgccgcttcagaatcagtactatcatttttacatgaaaaatctaactttagagttattgcagcaacacatgatattgagttggctgaactcttaaaacaacgttatgaaaattatcatttcaatgaggtaatagaaaataataacatacattttgattacaaaattaagcctggcaaagcaaatacacgtaatgccatcgaattattaaaaatcacttcatttccagcaaaaatatatgaacgagcaaaagataatgtcccgaaaatttagcatttaactttaaatataaaaacgtcagctatcacatgacagaagactatgaacagtttcaataatgttcatcgtaatcatgttaataactgacgtttattttattctgcagaatactcttctaaatctatattgctgtgcccatttaatgctaaatcagcaaatcgaccttgctgatacaaatagtggccggcaacgcctatcattgcagcattatctgtgcataatttaggacttgggatagttaattgaatgtcattgactttgcattgatccgctaaagattgacgtaatcctttattactcgccacgccaccagcaacaattaatcgctgaacaccatattctttacaagcttgaatagctttaaacgtaagcacctctacaacactattttgaaagctcgttgctacgttagcttcaatgattggaatatttttttgtcgttgattgtgaagttgattgattacggcacttttcaacccactaaaactaaaatcataactatctttatccaaccaaacacgagggaatgaataagtatcttcaccttcagcagccaaccgatcaacttgtggaccacctggataatttaaaccaattgttcgtgccactttatcataagcctcacctactgcgtcatctcgtgtttcaccaatgacttcaaatgataaatgatccttcatataaactaattcagtatgtccacctgaaacaataagtgcaattagcgggaatgttaatggctcttctatgtgattagcatatatatgtcctgcaatatgatgaacaggaataagtggcttatcgtaagcaaatgccaatgctttggctgcattaacacctattagtaacgcaccaattagtccagggccttctgtaaccgctatggcatcaatatcttctattgatacatcggcatccactagagcctcgtttattgttgttgttataccttcaacgtgatgtctacttgccacttcgggaacgacaccgccaaatcgtttatgactttcaatctgacttaaaactgtatttgataaaatatctctgccattttttataaaactaacgcttgtttcatcacaacttgtttcaacagctagtattaatatatctttagtcatttaaattcacccacataaccattgcgtcctcaccttcaccataataatttttacgtttaccaccatattgaaatcctaaattttcatatacatgttgtgccactttattattaactcttacttctaaactcatcacatcacaagtgtgacttgcatagtttattccgtattttaaaagcatttgacctaaaccatagcctctataattatcatcgattgcaactgttgtaatttgagcttgatcgataacaatccataaacctaaataaccaataatttgttgttcaaattctaagacaaaatatttcgcaaagttattttgctctatttcatgataaaatgcgtcaattgtccaagaactgtcattgaaactccgacgctcaatatcaaagacttgtggcacatcttctttagtcatctctctaatgtttaattgttcttttgactgttgatccaatttcgttccgcctcagctaatttatggtatttaggagtaaatgtatgtacgtctgaaggtttatctatcaattgatacatgactgatgcatttggtagctgcgcaatcacttcaccttgtaattcatcttgtaattttatagtatctttcccaatataaataaatggttggtttaaatcttctaaaaaagctcgcaatgcctctatcgacatatattgatcttctaaaatagtcactaattgaccattttgccactggaatatgcctgtataaactgcttgtcgtcttgcatcaaacacaggaaccaataatttatcagtatggtcgattgttgctgccaatgcctttaatgatgaaacaccatataatttaacatctaacgcatacgctaatattttagcaacagtaacaccgatacgtaagccagtatatgaaccaggaccttcagcaacaataatcgcatctaattgctgtttagctattttgctctgctcaaatagctgactaatcgcaggcattaattgcactgaatgattttgtttagaatccgtagttatttcagctaaaacttcatcgttttgcatcaatgctactgataatggttgattcgatgtatcaatgagcagcgaattcatgaataattgcctccttaatttgttcataatgttctccttgcgcgaacaactcaatttgtcttgtattttcagatattgttgaaatattaatagataaatgcgtcgctggaagtaaatcttttataaattgactccattcaataacagtaattgcctgatcttcgaaaaattcatcaaatcctaaatcttcatcagaatcttctaagcgataacaatccatatgatgcaattttaaatttttacccctatatgatttaatgatgttaaatgtcggggaattaatcgtacgtcttacaccaagagcttttcctataaattgcgttaacgttgttttacctgctcctaaatctccgttaagtaaaatcaaatcaccacttttcaattgctcaactaaaaatatagcaaattgattcatttcatctaaattatttatctttatcaatgttgattctcctatattatgcttttcattcataaaaatgattatccattgttcaatcgtatctaactttatatttaacctttatattgtaacaaatttcaacttaaatttcttatctttgaaacagattatctcttcaaagttaattgtaagaaaatttaaaatatttgttgacatactaaagcagatatagtaaattaaatttatcaaatttttagataattctaactattaaagtgatatataccattcacggaaggagtataataaaatgcttaatcaatatactgaacatcaaccgacaacttcaaatattattattttattatactctttaggactcgaacgttagtaaatatttactaaacgctttaagtcctatttctgtttgaatgggacttgtaaacgtcccaatattattgggacgtttttttatgttttatctttcaattacttatttttattactataaaacatgattaatcattaaaatttacgggggaatttactatgcgaagcgacatgatcaaaaaaggagatcaccaagcaccagcaagaagtcttttacatgccacgggcgcgctaaaaagtccaactgatatgaacaaaccatttgtagctatttgtaactcttatattgatattgttcctggacatgttcacttgagagagcttgcagatatagctaaagaagcaattagagaagccggtgccattccatttgaattcaatacaattggtgttgatgatggaatagctatgggacatatcggaatgcgatattctctaccatcacgtgaaattattgcagatgcagctgaaactgtaattaacgctcattggtttgacggcgtattttacattcctaattgtgacaagattacacccggtatgattttagcagccatgaggacaaacgtaccagctatcttttgctctggtggaccaatgaaagctggcttatctgcacatggaaaagcattaacactttcatcaatgtttgaagcagtcggcgcatttaaagaaggatcgatttctaaagaagaatttttagatatggaacaaaatgcctgccctacttgtggttcatgtgctgggatgtttactgcaaattcaatgaactgtttgatggaagttttaggtctagcattaccatacaacggtactgcacttgcagtcagtgatcagcgacgagaaatgattcgccaagcagcttttaaattagttgaaaatattaaaaatgatttaaaaccacgtgatatcgttactcgcgaagcaattgatgatgcatttgcacttgatatggctatgggtggttcaacaaacacggtactgcatacgttagccattgccaatgaagctggtattgattatgacttagagcgcattaatgctattgccaaacgcacgccatatttatcaaaaatagcacctagttcatcgtattcaatgcatgatgtgcatgaagctggtggcgtcccagcaattattaatgaattgatgaagaaagatggcacgttacacccagatagaatcacagttactggcaaaacgttacgtgaaaataacgaaggcaaagaaattaagaactttgatgtcattcaccctcttgatgcaccatatgatgcacaaggcggtttatctatcttatttggtaatatcgcccctaaaggcgcagttattaaagttggcggcgttgatccatctatcaaaacatttactgggaaagcaatttgtttcaattcgcatgatgaagctgttgaagcaatagacaatcgtaccgttcgtgcaggccacgtcgttgtcattagatatgaaggacctaaaggtggaccaggtatgcctgaaatgttagcacctacttcctctattgttggtcgcggcttaggtaaagatgttgcattaattactgatgggcgtttttccggtgccacaagaggtattgcagttggtcatatttcccctgaagctgcatctggtggaccaattgccttaattgaagatggagatgagattactattgatttaacaaatcgtacattaaacgtaaaccagcctgaagatgttctagcgcgtcgccgagaatctttaacaccgtttaaagcgaaagtaaaaacaggttatctagctcgttatactgccctagtaactagcgcaaatacaggtggcgtcatgcaagtccctgagaatttaatttaatttatttttatattggagatggttaaaatgtctaaaactcaacatgaagtaaaccaaaatattgaccctttaaaaatggctgaatcacttgaacttgaacaactaaatgaaaaaactttaaatgacatgcgttcaggatcagaagtgctagtagaagctctacttaaagaaaatgtggattatttattcggttatcctggtggtgccgtactacctttatacgacacattttatgatggtaaaatcaaacatattttagcaagacacgaacaaggtgctgttcatgctgcagaaggttatgcacgtgtatctggtaaaactggcgtcgttgtagttacaagcggtccaggtgcaactaatgtaatgacaggtattacggatgcacattgcgactctttacctctagttgtattcactggacaagttgctacaccaggcattggtaaagatgcattccaagaagcggatattctatctatgacttcaccaattacaaaacaaaattatcaagtgaaacgtgttgaagatatccctaaaatcgtacacgaagctttccatgtagctaattctggacgcaaaggtcctgtagtgattgattttccaaaagatatgggtgttttagctacaaatgtggatttatgcgacgaaatcaatattccaggttatgaagttgttacagaaccagaaaataaagacattgacactttcatctcacttttaaaagaagcgaaaaagcctgtcgtattagccggcgcaggtattaatcaatcaaaatcaaatcaattattaacacagtttgttaataaacatcaaatcccaacagttactactttactaggtctaggtgctgtaccttatgaggatacactatttttaggtatgggaggtatgcatggttcttatgctagtaacatggcattaactgagtgtgatttactcattaatttaggtagccgcttcgatgatagattagcaagcaaacctgatgcctttgcacctaacgccaaaattgtacatgtagatattgatccttcagaaatcaataaagttattcatgtagatttaggtattattgcagactgtaaaagatttttagaatgtttaaatgataaaaatgttgagactatagaacacagtgactgggttaaacattgtcaaaataataagcagaaacacccatttaaacttggtgaagaagatcaagtattttgtaagccacaacaaacaatcgaatatatcggcaaaattacaaatggtgaagcaattgttactacagacgtgggacaacatcaaatgtgggcagctcaattttatccatttaaaaatcacggacaatgggttacaagcggtggtttaggaacaatgggattcggtattccttcgtcaattggtgccaaattagctaatcctgataaaacagtcgtatgtttcgtcggtgacggtggtttccaaatgacaaaccaagaaatggcacttttacccgaatatggtttagatgtcaaaatcgtactaatcaataatggaacattaggtatggttaaacaatggcaagataagttctttaatcaacgcttctcacactcagtatttaatggtcaacctgattttatgaaaatggcagaagcatatggcgtcaaaggtttcttaatcgataagccagaacaactggaagaacaattagatgcagcgtttgcttatcaaggaccagctttaattgaggttcgtatttcccctactgaagctgtaaccccaatggttccgagtggcaaatcaaatcatgaaatggagggcttataatgacaagaattcttaaattacaagttgcggatcaagtcagcacgctaaatcgaattacaagtgcttttgttcgcctacaatataatatcgatacattacatgttacacattctgaacaacctgggatttctaacatggaaattcaagtcgatattcaagatgatacatcacttcatatattaattaaaaaattaaaacaacaaattaatgttttaacggttgaatgctacgaccttgttgataacgaagcttaattttaagacaaaggcaatgatgcgctaattagttatagataaatcataggctgctagttaacatctgccactattacaaagttatatttcagaattttcgaaaaacaaaatatttaattatttggaggaatttattatgacaacagtttattatgatcaagatgtaaaaacggacgctttacaaggcaaaaaaattgcagtagtaggttatggatcacaaggtcacgcgcatgcacaaaacttaaaagacaatggatatgatgtagtcatcggcattcgcccaggtcgttcttttgacaaagctaaagaagatggatttgatgtgttccctgttgcagaagcagttaagcaagctgatgtaattatggtgctattacctgatgaaattcaaggtgatgtatacaaaaacgaaattgaaccaaatttagaaaaacataatgcgcttgcatttgctcatggctttaacattcattttggtgttattcaaccaccagctgatgttgatgtatttttagtagctcctaaaggaccgggtcatttagttagacgtacatttgttgaaggttctgctgtaccatcactatttggtattcaacaagacgcttcaggtcaagcacgtaatattgctttaagttatgcaaaaggtattggtgcaactcgtgcaggtgttattgaaacaacatttaaagaagaaactgagacagatttatttggtgaacaagcagtactttgcggtggtgtatcgaaattaattcaaagtggctttgaaacattagtagaagcgggttatcaaccagaattagcttattttgaagtattacatgaaatgaaattaatcgttgatttgatgtatgaaggcggtacggaaaatgtacgttactcaatttcaaatactgctgaatttggtgactatgtttcaggaccacgtgttatcacaccagatgttaaagaaaatatgaaagctgtattaactgatatccaaaatggtaacttcagtaatcgctttatcgaagacaataaaaatggattcaaagaattttataaattacgcgaagaacaacatggtcatcaaattgaaaaagttggtcgtgaattacgcgaaatgatgccttttattaaatctaaaagcattgaaaaataagatagacctacaatgaggagttgttaaatatgagtagtcatattcaaatttttgatacgacactaagagacggtgaacaaacaccaggagtgaattttacttttgatgaacgcttgcgtattgcattgcaattagaaaaatggggtgtagatgttattgaagctggatttcctgcttcaagtacaggtagctttaaatctgttcaagcaattgcacaaacattaacaacaacggctgtatgtggtttagctagatgtaaaaaatctgacatcgatgctgtatatgaagcaacaaaagatgcagcgaagccggtcgtgcatgtttttatagcaacatcacctattcatcttgaacataaacttaaaatgtctcaagaagacgttttagcatctattaaagaacatgtcacatacgcgaaacaattatttgacgttgttcaattttcacctgaagatgcaacgcgtactgaattaccattcttagtgaaatgtgtacaaactgccgttgacgctggagctacagttattaatattcctgatacagtcggctacagttaccatgatgaatatgcacatattttcaaaaccttaacagaatctgtaacatcttcaaatgaaattatttatagtgctcattgccatgacgatttaggaatggctgtttcaaatagtttagctgcaattgaaggcggtgcgagacgaattgaaggcactgtaaatggtattggtgaacgagcaggtaatgcagcacttgaagaagtcgcgcttgcactatacgttcgaaatgatcattatggtgctcaaactgctcttaatctcgaagaaactaaaaaaacatcggatttaatttcaagatatgcaggtattcgagtgcctagaaataaagcaattgttggccaaaatgcatttagtcatgaatcaggtattcaccaagatggcgtattaaaacatcgtgaaacatatgaaattatgacacctcaacttgttggtgtaagcacgactgaacttccattaggaaaattatctggtaaacacgccttctcagagaagttaaaagcattaggttatggcattgataaagaagcgcaaatagatttatttaaacaattcaaggccattgcggacaaaaagaaatctgtttcagatagagatattcatgcgattattcaaggttctgagcatgagcatcaagcactttataaattggaaacactgcaactacaatatgtctctagcggccttcaaagtgctgttgttgttgttaaagataaagagggtcatatttaccaggattcaagtattggtactggctcaatcgtagcaatttacaatgcagttgatcgtattttccagaaagaaacagaattaattgattatcgtattaattctgtcactgaaggtactgatgcccaagcagaagtacatgtaaatttattgattgaaggtaagactgtcaatggctttggtattgatcatgatattttacaagcctcttgtaaagcatacgtagaagcacatgctaaatttgcagctgaaaatgttgagaaggtaggtaattaattatgacttataacattgttgccctacctggtgatggaatcggtccagaaattttgaacggatctctatcattgcttgaaattataagtaataaatataactttaattatcaaatagagcaccacgaatttggtggtgcctctattgatacattcggcgaacctttaactgagaaaaccttaaatgcgtgtaaaagagcagatgctattttactgggtgcaatcggtggacctaaatggacagatcctaacaatcgaccagaacaaggattattaaaattgcgtaaatccttaaatttatttgcaaatatacgccccactaccgttgtcaaaggcgctagttctttatcacctttaaaggaagaacgcgttgaaggcacagatttagttatagtccgtgaattgacaagtggtatttattttggagaacctagacattttaataatcacgaggccttagattctcttacttatacaagagaagaaatagaacgcattgttcacgtagcatttaaattggccgcttcaagacgaggaaaactaacatcagttgataaagaaaatgtattagcttctagtaaattgtggcgcaaagtcgtaaatgaagtaagtcaattatatccagaagtaacagtaaatcacttacttgttgatgcttgtagtatgcatttaatcacaaatccaaaacaatttgacgtcatcgtatgtgaaaacttatttggcgatattttaagtgatgaagcttcagtgattcctggttcacttggtttatcaccttctgctagttttagtaacgatggtccaagattgtatgagcctattcatggatcagcaccagatattgcaggtaaaaacgttgccaatccatttggaatgattctatctttagcgatgtgtttacgtgaaagcttaaatcaaccagatgctgcagatgaattagaacaacatatttataacatgattgaacatgggcaaacgacagcagatttaggcggcaaattgaatactactgatattttcgaaattctatctcaaaaattgaatcactaagggggagatgtaaatgggtcaaacattatttgacaaggtgtggaacagacatgtgttatacgggaaattgggcgaaccgcaactattatacattgatttacaccttatacatgaagttacttctcctcaagcatttgaaggacttaggcttcaaaacagaaaattaagacgcccagatttaacatttgcaacactcgatcacaatgttcctactattgatatattcaatattaaagatgaaattgcaaacaaacaaatcacaacattacaaaaaaacgccatagattttggggtgcatatttttgatatgggttctgatgaacaaggtattgttcacatggtaggacctgagacaggacttacacagcctggaaagacaatcgtttgtggtgactctcacacagcaacacatggagcatttggtgctattgcatttggaattggaacaagtgaagttgaacatgttttcgcaactcaaacgctatggcaaacaaaacccaaaaacttaaaaatcgatattaatggtaccttaccaacaggcgtctatgctaaggacattattctgcatttaattaaaacgtatggtgttgactttggtacaggctatgctttggaatttactggcgaaacaattaaaaacctttcaatggacggtcgaatgactatttgtaacatggctatcgaaggtggtgccaaatacggcataatccaacctgatgatataacatttgaatatgttaaagggagaccatttgccgataacttcgttaaatcagttgataagtggcgtgagctatattctgatgacgacgcgatatttgatcgtgtaattgaacttgatgtttcaacattagaaccacaagtgacatggggaactaatcctgaaatgggtgttaatttcagtgaaccattccctgaaatcagtgatatcaacgatcaacgtgcgtatgattatatggggttagaaccaggacaaaaagctgaagatatcgacttagggtatgttttcctcggttcatgtacgaatgctagactatcagatttgattgaagctagtcatattgttaaaggaaataaagttcacccaaatattacagctattgtcgtgccaggttctcgtacagtaaaaaaagaagctgaaaaattaggtctagatactatctttaaaaatgcaggatttgaatggcgtgaaccaggatgttcaatgtgtttaggcatgaatcctgaccaagtacctgagggcgtacattgtgcatctacaagtaatcgaaactttgaaggacgacaaggtaaaggtgcaagaacacatttagtatcccctgctatggcagcagcagcagctattcatggtaaatttgtggacgtaagaaaggtggttgtttaaatggcagcaatcaaacctattacaacatataaaggtaaaatagtccctctcttcaacgacaatatcgatacagaccaaatcattcctaaggtacacttaaagcgtatttcaaaaagtggtttcggtccatttgcttttgatgaatggcggtacttacctgatggttcagataatccagatttcaatcctaacaaaccacaatataaaggggcttctattttaattacaggagataattttggatgcggttcaagtcgtgaacatgctgcttgggctcttaaggactatggttttcatattattattgcaggaagtttcagtgacatattttatatgaattgtacaaaaaatgcaatgttaccaattgttttagaaaaaaatgcacgtgaacatcttgctaaatatgttgaaattgaggtcgatttaccaaatcaaactgtgtcatcaccagacaagcgtttccattttgaaattgatgaaacttggaaaaataaacttgtaaatggcttagatgacattgcaatcaccctacaatatgaatcattaatagaaaaatatgaaaaatcactttaagggagttgaatattatgacagtcaaaacaacagtttctacgaaagatatcgatgaagcatttttaagacttaaagatattgtcaaagaaacacctttacaattagaccattacttatctcaaaagtatgattgtaaagtttatttaaaacgagaagatttacaatgggtacgttcttttaaattaagaggtgcttacaacgctatttctgttttgtcagatgaagctaaaagtaaaggtattacatgtgcgagtgcaggtaatcatgctcaaggtgttgcctatacagctaaaaaacttaatttaaacgctgttatctttatgccagtcactacacctttacaaaaggtaaatcaagtaaagttctttggaaatagtaacgttgaagttgtactcactggtgatacatttgatcactgtttagctgaagctttaacttatacaagtgaacatcaaatgaactttatagatccattcaataatgttcatacaatttctggacaaggtacgcttgctaaagaaatgctagaacaatcaaagactgacaatgttaactttgattatttatttgccgctattggtggtggtggattaatttcaggtattagtacttactttaaaacctattcacctactacgaaaattataggtgttgaaccttcaggtgcaagtagtatgtatgaatctgttgtcgtaaataatcaggtagtcacattgcctaatatcgataaatttgtggacggtgcatctgtagctagagttggcgatattacatttgaaattgcaaaagaaaatgtagatgattacgttcaagtagatgaaggtgcagtttgttctacgattttagacatgtattcaaaacaagcaattgtagcagaacctgctggcgcattaagtgtgagtgctcttgaaaactacaaagaccacattaagggtaaaactgttgtttgtgtcattagtggtggtaataatgatattaatcgtatgaaggaaattgaagaacgttctttattatatgaagaaatgaaacattattttattttaaacttccctcaacgccctggtgcattaagagaatttgtaaatgatgttttaggcccacaagacgatattacaaaatttgaatacttgaaaaaatcttctcaaaatacaggtactgtcattattggtattcaacttaaagatcatgatgatttaatacaactcaaacaacgtgtaaatcatttcgatccttccaatatttatattaatgaaaataagatgttatattcattgttaatttaacacatagtaagaaaaacagtcataaattgatttctaattgaaatcatcttatgactgctttttattatactttacatttctcgtttcgtcagattcaaacgttttcacttcgccaagccatttttctttgtgtttgcttttattttgacgttttagacataaaaaaagagaccttgcggtctcaacttgcctggtaacgttctactctagcggaacgtaagtttgctaccatcgtcgctaaagacctttcttgacttgtgacaatcgcttgcttctttcctctccttcggctctcgcttactcatttagctctactaaactcgttgcgctcttttcttgtttcgtcagattcaaacgttttcacttcgccaagccatctttctttgtgtttgctttttactatgtaactttagacataaaaaaagagaccttgcggtctcaatgcggctcatcgcatccattttttgcctggcaacgttctactctagcggaacgtaagttcgactaccatcgacgctaaggagcttaacttctgtgttcggcatgggaacaggtgtgacctccttgctatagtcaccagacatatgaatgtaaattatacattcaaaactagatagtaagtaaaagtgattttgcttcgcaaaacatttattttgattaagtcttcgatcgattagtattcgtcagctccacatgtcaccatgcttccacctcgaacctattaacctcatcatctttgagggatcttataaccgaagttgggaaatctcatcttgaggggggcttcatgcttagatgctttcagcacttatcccgtccacacatagctacccagctatgccgttggcacgacaactggtacaccagaggtatgtccatcccggtcctctcgtactaaggacagctcctctcaaatttcctacgcccacgacggatagggaccgaactgtctcacgacgttctgaacccagctcgcgtaccgctttaatgggcgaacagcccaacccttgggaccgactacagccccaggatgcgatgagccgacatcgaggtgccaaacctccccgtcgatgtgaactcttgggggagataagcctgttatccccggggtagcttttatccgttgagcgatggcccttccatgcggaaccaccggatcactaagtccgtctttcgaccctgctcgacttgtaggtctcgcagtcaagctcccttatgcctttacactctatgaatgatttccaaccattctgagggaacctttgagcgcctccgttaccttttaggaggcgaccgccccagtcaaactgcccgcctgacactgtctcccaccacgataagtggtgcgggttagaaagccaacacagctagggtagtatcccaccagcgcctccacgtaagctagcgctcacgtttcaaaggctcctacctatcctgtacaagctgtgccgaatttcaatatcaggctacagtaaagctccacggggtctttccgtcctgtcgcgggtaacctgcatcttcacaggtactatgatttcaccgagtctctcgttgagacagtgcccaaatcgttacgcctttcgtgcgggtcggaacttacccgacaaggaatttcgctaccttaggaccgttatagttacggccgccgtttactggggcttcgattcgtagcttcgcagaagctaaccactcctcttaaccttccagcaccgggcaggcgtcagcccctatacatcaccttacggtttagcagagacctgtgtttttgataaacagtcgcttgggcctattcactgcggctcttctgggcgttaaccctaaagagcaccccttctcccgaagttacggggtcattttgccgagttccttaacgagagttcgctcgctcaccttagaattctcatcttgactacctgtgtcggtttgcggtacgggcacctattttctatctagaggcttttctcggcagtgtgaaatcaacgactcgaagacacaatgtcttctccccatcacagctcagccttaacgagtaccggatttgcctaatacccagccttactgcttagacgtgcaatccaatcgcacgcttcgcctatcctactgcgtccccccatcgattaaaacgattataggtggtacaggaatatcaacctgttatccatcgcctacgcctgtcggcctcagcttaggacccgactaacccagagcggacgagccttcctctggaaaccttagtcaatcggtggacgggattctcacccgtctttcgctactcacaccggcattctcacttctaagcgctccacatgtccttacgatcatgcttcaacgcccttagaacgctctcctaccattgtccaaaggacaatccacagcttcggtaacatgtttagccccggtacattttcggcgcagtgtcactcgactagtgagctattacgcactctttaaatgatggctgcttctaagccaacatcctagttgtctgggcaacgccacatccttttccacttaacatatattttgggaccttagctggtggtctgggctgtttccctttcgaacacggaccttatcacccatgttctgactcccaagttaaattaattggcattcggagtttgtctgaattcggtaacccgagaggggcccctcgtccaaacagtgctctacctccaataatcatcacttgaggctagccctaaagctatttcggagagaaccagctatctccaggttcgattggaatttctccgctaccctcagttcatccgctcacttttcaacgtaagtcggttcggtcctccattcagtgttacctgaacttcaacctgaccaagggtagatcacctggtttcgggtctacgaccaaatactaaacgccctattcagactcgctttcgctacggctccacatttactgcttaaccttgcatcaaatcgtaactcgccggttcattctacaaaaggcacgccatcacccattaacgggctctgactacttgtaagcacacggtttcaggttctatttcactccccttccggggtgcttttcacctttccctcacggtactggttcactatcggtcactagagagtatttagccttaggagatggtcctcccagattccgacggaatttcacgtgctccgtcgtactcaggatccactcaagagagacaacattttcgactacaggattattaccttctttgattcatctttccagatgattcgtctaatgtcgtcctttgtaactccgtatagagtgtcctacaaccccaacaagcaagcttgttggtttgggctcttcccgtttcgctcgccgctactaagggaatcgaattttctttctcttcctccgggtactaagatgtttcagttctccgggtgtgccttctgatatgctatgtattcacatatcgataacatgacataactcatgctgggtttccccattcggaaatctctggatcaaagcttacttacagctccccaaagcatatcgtcgttagtaacgtccttcatcggcttctagtgccaaggcatccaccgtgcgcccttaataacttaatctatgtttccaccatttttataagtcaaacgctcacatacggcttcgttttcattattttaaatgctcatttacataagtaaactctgctttaaaataatttaactcattgtctgctaaacgttttcttttataaaaagatttaaacgcgttattaatcttgtgagtgttctttcgaacactagcgattatttcttatgaattcaagcttatttaaaactctttattcactcggttttgcttggtaaaatctatattttacttacttatctagttttcaatgtacaatttctttttagtcaagcgctcgcatactgctttattttcaaaaaatcaaatgctcatttacaaaagtaaactccgctttaatttttcttaatgcattgtctgacaaccgctttctttaaaaagaatagattgtcaagcgctcgcataagcaatatcactttaaccaaaaaatatttgaatgttaaataaacattcaaaactgaatacaatatgtcacgttattccgcatcttctgaagaagatgttccgaatatatccttagaaaggaggtgatccagccgcaccttccgatacggctaccttgttacgacttcaccccaatcatttgtcccaccttcgacggctagctcctaaaaggttactccaccggcttcgggtgttacaaactctcgtggtgtgacgggcggtgtgtacaagacccgggaacgtattcaccgtagcatgctgatctacgattactagcgattccagcttcatgtagtcgagttgcagactacaatccgaactgagaacaactttatgggatttgcttgacctcgcggtttcgctgccctttgtattgtccattgtagcacgtgtgtagcccaaatcataaggggcatgatgatttgacgtcatccccaccttcctccggtttgtcaccggcagtcaacttagagtgcccaacttaatgatggcaactaagcttaagggttgcgctcgttgcgggacttaacccaacatctcacgacacgagctgacgacaaccatgcaccacctgtcactttgtcccccgaaggggaaggctctatctctagagttgtcaaaggatgtcaagatttggtaaggttcttcgcgttgcttcgaattaaaccacatgctccaccgcttgtgcgggtccccgtcaattcctttgagtttcaaccttgcggtcgtactccccaggcggagtgcttaatgcgttagctgcagcactaaggggcggaaaccccctaacacttagcactcatcgtttacggcgtggactaccagggtatctaatcctgtttgatccccacgctttcgcacatcagcgtcagttacagaccagaaagtcgccttcgccactggtgttcctccatatctctgcgcatttcaccgctacacatggaattccactttcctcttctgcactcaagttttccagtttccaatgaccctccacggttgagccgtgggctttcacatcagacttaaaaaaccgcctacgcgcgctttacgcccaataattccggataacgcttgccacctacgtattaccgcggctgctggcacgtagttagccgtggctttctgattaggtaccgtcaagatgtgcacagttacttacacatatgttcttccctaataacagagttttacgatccgaagaccttcatcactcacgcggcgttgctccgtcaggctttcgcccattgcggaagattccctactgctgcctcccgtaggagtctggaccgtgtctcagttccagtgtggccgatcaccctctcaggtcggctatgcatcgttgccttggtaagccgttaccttaccaactagctaatgcagcgcggatccatctataagtgacagcaagaccgtctttcactttcgaaccatgcggttcaaaatattatccggtattagctccggtttcccgaagttatcccagtcttataggtaggttatccacgtgttactcacccgtccgccgctaacatcagagaagcaagcttctcgtccgttcgctcgacttgcatgtattaggcacgccgccagcgttcatcctgagccaggatcaaactctccataaaaattatgatgtttgattagctcataaatactaaataatgtttgtaacttatagttacgtttttggaattaacgttgacatattgtcattcagttttcaatgttcattaaaattatctatggagcgggtgatgggaatcgaacccacaacatcagcttggaaggctgaggttttgccattaaactacacccgcttatttaattaagaattttgatgcggccgagaggacttgaacctccacgggatttctcccactaggccctcaacctagcgcgtctgccattccgccacgaccgcggatataggcatttaaaacatcttcgtttttcagaacgttatttattatattatgtttaaaaatatttgtcaataacttttaatcgtttttttacaataaattaatttgtgttatcagttgttaacacaacgctatttataataaaacattaagaacttattgtcaacatattttataaattaaatttagaattgactgtctttcaaatcaaagtttatttaatttgttcttttttaaggaacgtgtttaatcatactaactataagctgtacagtcaatagaaaagttcaatcaaaatgtcattaaaaatgtataattatcttttgtgctactttaaagctttaattgggtaaagtttatatattatttattactaaaatacgtcaagatttttaatctaatcaatttaatttcatcctatcaagtcacaatttatgccattacctatatcataagtagaaaagccgagattgcgaagtattaaattacgacaatctcggctttaaacattttataaacacaatttcttcttattcaattactatgtttaccaatcaaaataactcactgataaattctatataaattccatacaactcataaataatcttacatatacacgaattagctctatttgtattgtacttatttcaattgtcttttcattcttaattttccattgcaatgtccgcaacgcatacgattcgtatcaactttacggatacgtatatattttgcatgacatttagtgcaataatattcataatttgcccgttgttgatagctttcaatgctgttacaaaatctaggcgctccaacctgttggctcaatcgtttaaaatcttgatctttatgttgataacctttaccagcaatatgcaagtgataatgacataattcgtgcagtataatttttacaacagcatcttctccataatgctcatattgttttggattaatttcaatatcatgggactttaaaagataacgtccgcctgttgtacgtaaccttttattaaaatatgcacaatgtcgaaacgtacgtccaaatttttcttccgaaagattctcaaccattcgctgaagtttgtcattattcatgtggatcaatcatcgttaatgatactttgtctttatttttgtcaatactgtaaatccaaacgtcaacgatatcaccaacactgacaatatccattggattttttacgaacttcttagaaagtttcgaaacatggacaagtccatcttgtttaacacctatatctacaaatgctccaaaatctactacatttctaactgtaccactcaatttcattccttcttgtaaatcttcaattgatagcacatcggatttaaggattggtgtttcaaactcgtcccttggatctcgattaggtgctttcaaggatttaataatatcctctaatgtaggtacaccgacttgtaattcaatcgccagttcatccatatccaatgaatttaatttagcttttaatgcatcactacctaaatcattgccaccaaatccgagtttatctaataactgatacgttactttatagctttcgggatgaatcgatgtattatccaatggctctgaaccgtctactattcttaaaaatcctatactctgctcaaaagttttagcacccaaacgcttaatcttgcttaactctttattatgctttattgcgccattttcttctctatatgcaattatatttttagcaatttgcgaacttagaccagacacatattgtaataatgatgatgatgctgtattgacatcaacacctacttggttaactgctgtttcaacaacgaaagttaatgcattttctagtgctttttgattaacatcatgctggtattgtccgacaccaatagatttaggatcgattttaactaattcacttaatggatcttgaacgcgtcgtccaattgatacggcacttctttcttccacttgaaaatcaggaaattcatctctagcaatttctgatgctgagtatactgaagcgcccgcttcattgacaatgatgaattgtactggcaactgatgctttttaattaaatctgcaacaaattgttctgtttcacgacttgcagtaccattgccaattgcaattaattgcacatcatacgctttaaccatttgtacaaaatccttctctgctgcctcttttttagaaactggtggatgcggataaatcacaccttttgctataaaagtaccgaatgggttaatgactgctaatttacaacctgttctaaatgctggatctacgcctaatatttgtttacctttcattggaggttgcagtaatagatttcttaagttttcactaaaaacatctattgcatgattttcagctttttcagttaaatcagcatggatttcacgctctatcgaagggacaattaagcgtttcaagctatctttaatcgcctctaaaatataactgcgatttacattattatgattgatttcttgacgtgcaatgaaatcctctactgatgtcgtatcgaattcaaactttacagataatactttctctttttcaccacgattaacagctaaaactctatgattagcaatgcgtttaattggctcactatatgcatagtacatttcaaaaatacctttttcatcttcagcatttttctttttagatgtagttaacacaccttgatgatacatatcttttaaaatttttgttctatatttaggattatctgaaatttgttccgcaataatatcttgtgcacctttgatagcatcttcaaccgattgcacttcttcatttataaattgttgtgctttttcttcaattgagacttcatgtttacgtgccttcatccatatcgctaatggctctaaccctttacgtttcgcctcagttgcccttgtctttttcttttgtttaaaaggcctatataggtcttcaacacgttgtaatttgttctgttttaaaatatcgttctttaattcctcagtaagtaatccttgctgttctatatttttgataacttcttctttacgtttttgtaaattgaccatatattggtattcgtcatcaatttgctttatttgaacttcatctagtccaccagtttgctcttttcgatacctcgcaataaatggtactgtatttttttcttctagcagtgttaatactgcttcaatttgttttttactaaattgatatttctctatgattgaattaatcaattgattgtccatttacttaacccacactttttcttaaatttactcatttattttaacatattctaaaatacttctattaaggtatgatacttaatgtaattttcacttccaaaacatttaaaacgaatgattaggtcatactatattttaaaacgcactaagattattgaaaatgacacaccatcatttctaaatttcataatctaagactacttttttattctaatagcaacccacctatttaaaacgacaattagatatcttcttcacttaaattattaatactatatcgcgacatttatgtggatacacattaaactacactaataatgtattaattcgaaaatcttaattaaattaaaaatacccctcgatttcaatttaataatcaagggataattatatggatttttcattataaaacgtatcattaataaacaaattctattgatgtgctgcttcttgtaatttcttaattgccgttctctgaagtcgtgatacatgcatttgacttaaaccgatacgctcacctgtctctttttgactcaatccttcaataaacgtacattgtatgatttctcgttcgcgatcagataatataggtaatattttttctaaaatcatacgtttttcagttaagtcataatggtcatcttgttgccccataatatctaatagcgtaacagttgaaccatctttatcagcttcaatggaatgatcaacacttaacgcattataactttgtcccatttccattgcttctaacacttcttcttctgagacttctaatcgatcagctatttcactgatagaaggtgaacgctctaattcagcggttagttcatcgctcacttttttgattcttggcccaatttctttaatacgtctcggaacatgtacactccaagttttatctcgtagatatcttttgatttcaccgattacagtaggtactaaaaaggcttcaaacttccgttcaaaggacatatcgaatctatttatggcacctattaaaccaaccataccaacttgaactaaatcttcgtgatgtgattgtcctttagaatatttatatgccaatgactcaattagtttttggtaatgtttaactaacttatcctgtgcatctgtattcttattttcttggtgttctttaatccattggttaatttgctcaggtgaaacttcattagctgatttcgactctttcgccattatttcgcacctgctctttttttatatacttagtcatactgattgtcacaccagattctttatatactgtcacttcatccattaaagattcgattaaaaataaacctaggccaccttcgcgtaaaaagtctatattttcgtttttatcgtaaggacctatttttgatttagttgtttcataatcaaaactgtcacctttatcagaaataacaattttaattttatcttctaaaatttcaaaatatatgttaataatgcctacattgttattttctttgtatgcatgtttaactgcatttgtcacagcttcactaactgcaatcttggcatcttcaatatcatcatatgtagcaccagctctcgaaaaaacgccagaaagtgttaaacgaattaaacttacatactctgccgatgctggcacgcgcatttcgataaaatcttctttagattgcatgttattcgacctccgttccttcattaacatgcattaaatccttaagaccagtaatttcaaatagtctaccgatacgatctgacacacctaaaatgtatagttctttatcattttggtttaatgcttttaatgtacctacgaataaacctaaacctgtcgaatccatataactcacattttctaaattaacataaatatcacgagttccatcttgtctcataggtgttaaaacctcttctaattcaggcacagtataaacatctaattctccaccgactttaacttcgtaaaatttatcttgagtggttgtttctatattaagattcatttcattacactcctacttattaaaaatatttatcttcattttaagcgctgtatccaccatatttatatttcaaattattatatacccatcgaaataatttctaatcttcttttttaaattaatttactctttttataatcaaaatagtcatatcatcttttttatttgggttttgaagctttaaaattgcttcatagataatttgaacaatatcttgtgggtgcatatgtttatgttttttaatatattctaaaagtttttgtttatctataaaggtaccttcactatttctagcttcagtcacaccatccgttaaaatgataattaaatcatcaaggtatattggaatttcttgttgttgatatcgtgtttgtgaactgattcctaacactctacctctaactgaaatttcttcgaattcttctttttcagcgcgataaatatatccaggctcatgaccagctgaactacaatacaataaatggttcatttcttcatataaaccataaaacattgtgacgaacatattttgattaatattcttttcaacaacacgatttaaacgttttaaaccatcactcggtaattgtgagtgtccataagaatccatgccaaactttatcatactcattgctaaagcagctggtataccttttccaatgacatctgcaacagcaaagctcattgtgccatcgttatggtcaattaaattaaaataatctccacttactttttgtgccgccactgaaataacgccaatttgaatactatcaaattgtggaatatctgttttaagcattgtttgttgtaagctagaagctaagtctatctctttatcgtgaacttgaagtttatctaccaatctttgataatctcgataactataaccaaagcctttaacgatttcttgtaagacatctaatgtcttgaacacatcttcacgcgttaagtttaacgtcaatatatagtttttgtgaatatcgacaatgtcttcaggcaagacgtccttacgaatcacttcgtcagtgtatttctcacacttttttatcaattctactttatcttggcacgttaaactttcatcaattaaacccttataatgttgcttaaattcttccacgattagttgcctcctcacttcccttacaaagcaaatgcttaagcaaggataattatgattcacttactaacatttatttaattgcacttatcaattttgtcgtttgcaattttgctgtagatgatacttttaagctaaaaaaactttaggatggaatacctaaagcctaaaaaacttaagacatccttttataataaaaaatatgaatatcataactggtatttgctaaaatctttgtttataagaaaattcttcgtacagaatttagaaatagttataattattataaagttattgtcttttatatcaatattttatttatctctgaaaaatacatataatagacgcctaatttttctggtgagctactgcattcagccctaaactaatcattagtgcattatctacttctttcattttatcatcggataagtacgtcagtttttctttcaatcgttttttatcaagtgtacgaatttgttctaataatataactgagtctttatccaacttatactttttcttttcaatctctacatgtgtcggtattttcgctttattaatcctaccagttattgccgcaacaataactgtaggactatatttattaccagtatcattttgaattatgactacaggtctgactcccccttgttcagatccctgtactggtgataaatctgctaaataaacatctcctcgtctaatcattcattcgttgaattagaagataaatatgtttcgttgcaatcgcatgcttcacactctatcggaaaagcttcgttcgctagggagagatttaaatcagccatttgtgaatatccttcttttaaagattgttctaagctatgacttctattttgactaaaagataacatatgagaacctccaattgattccaaaagttattaaatgacctttaattactctaatgataacaaattttatatgcactgaccatattattttaacaattcatttgttacaaaacgttgatcaccatcatgatagattcgcggcaaacgtctcgacaagttacaaagcacttcataattaatagtatgttgcttttcagctaccacctctaccgactgtggactttctctatgattatctattaaaatcaccgaatctccagctttaacttgatctggcactttaacaattgtctgatccatacatacgcgaccaataacttcgcattgatgaccatttacatttacaaagctaccttgcattatgcgtaaatagccatctgcatatccaataggtaacaatgctattgtagttgggtcagtagctgtataagttgcaccataacttacagactcacccgcttgtagcgtctttgtttgaactacattagcaattaattgcacacttggtttaaggtgtactttaactttttgctgtacatactctgatggataatatccataaagggaaattcctggtcttattgcattacagaattggcaatccattagtagagaacctgctgagttctgacaatgtatatattcaggtttaattgcttcattgaccatatctttaaaacgttgatattgttcagttgtcatatctcctggttcgtcagcacaggcaaagtgtgtaaacacgccttcaaatacaagttgctcatattgttgaatgatttcaatcacttcttgatacgtattagtatctttaatacctaaacgtcccattcctgtatctaatttaatgtgcaaccataactttttctcttgctcaccagaaatgtttttaattgcttctttcaaccactgtttagacggaaccgttaaggcaactcggtgttgtatcgctttatcaatatctttagctggtaacacacctaagactaaaattttagcagtaatcccatgcattctaagttctatcgcttcatctaacgttgctacagcaaaaaatgtggcgccattttccattaaatgacgtgctactttaacactacctagtccataggcattggctttaacgacagccatcactgttttatttggatgcaatgtactgaatactttgaaatttgatgcaacagcgtttaaatctacattcatatacgcagatctataatatttatccgacatattacttcctcctgtaattcccacacgttttaaaactagatcttaattatcattgtataacaaatttaaaatgctgacttttctaaaacaacttggctcatcgcataatgctcagtgtgtgagatactaacatgtacgatgaacccttcgtaatcaatctttggtttgccaagttcgtcgttgtaacagtctatatcgttaaaagctacatgttttcctaagcctgtgcctaatgctttactgaacgcttcttttgtagcaaacctgccagctaaaaattcaattttacgttgctcatgtgtgaaattgttgaatttgtgctgttcatttttagttaaaatccgctcaaccaattttggctgcttactatataacacttttattcgatcgatttcgattaaatctacaccaattccatgtatcattgattattcctcatttttattgttttctaaatgtctctcgttatttaaccatcgtttcaatctacgtgcttcacttctatctattaattcaatttcagcttgaccacccgctgtataaagggtcaaagttgctaatcgatagcgtctcattataggaccaacatcgatatcaatattttgaatacgaaaatatggtattactttttcatccaaaaataaaatgccgtttcgtacacgcaaatggtgtttttcaaatgcatatctgcagtgcttatatcgatatactggcgctatgacaagcgtgaaaacagcaacaagtaatattataatcacactactaacaatggatatattgttatctaatatctcccaaaatagccagttcaaaatattaaatgcgattaaaagtacaagcgctatgggtatccaaaacagcacagcacttaacctcatcacttttttagcgtgtggtgacataaaattataatccctcatcattttcacctcttaaataccatgatttcaatttatttgcatcttcacttcttgcgtattttaggttaatcgattgggctcccacacctttagcaacaataaagctaaaattatttaaattgttgcgtttaagtaatgtatgttgccaagtgtcaaatcctataatgtgatgcgctttaaaataataaatatttcgtttcaatagctcgaaattctggatagtaatttgttcttctgtcattttaaaacccgcatgtttgacataaagatatcctttgatcacaaataaaccaataatgactattgttataatcgtaaataacaataataattgattccaaaaataacagccaatacctgccatagctatgacaataatactaggtattaaaaagtgtctgtggaaacctgacaaaggcataccttcattaacttgttgataagataaatctggtactaaattctggataatttgatatgctttgtctcgtttaataaacggcaatatcggcacactacctgaatcattgtcatcatcttcgatttttttattttcaaaatcacttgtgatgataaaatgtattgctgtgtagccaaataatcttcgtatatatgactgacgttcaacaacagcttgcaatcgtttcgttggtacagttactttcttcttgttaaagagaccatattcaattttaagttgctcattttcaagcatcaccgaaaagccataaaatcttatcatcgttataatcgttccaataatatatgccactattaatactagtaaaatgatgattaatactgaaatacttacaatttgaacccattgactaatttcatgatttagcttcgaccatgggatcaactctcttacagccccgtaaatcggtactaaagctgctaacgttacaccaatggcgccactggtcattgccataaatagtgattctttaaaattcatctgatatataggaatgcgtttatttttctgattaagcatactatcagtgttctgcacttcatctaagcgaccttctgcgatgtcttccacattaccttcaatgtcatgattacagttgtcattcttctcagcactagacttttgcgccacttctgtcttcaactctgtttgcaattgatcaatatagcgttcaagatattcaccttgttttttcgaaataacacttaagacaataccatcacttggtgttttgatttgtaaatccacaccaccaataatttgattgacgaccccttgtgtcatatcaacggactgaatacgttttatatttaattctttacgctttttattaaaaatacctgttgttaaaatgaaataattatcctcaatccaatatcgcgtgttcataattccgacaatttgagaaatgtatgatattaaaaagaatacaaatacaatacctatccataaatatgattcgggattcgtataatcaaaatctttcaattgaaagataatgaaaataaaaaagacgactatgttttgtttgatagcattgattatgccattaaaatatgaaatcggatgtaatttttgaggttcagacatcactttcaacccctctcaaattcgacatagttctcgcttcgattattttaacatcgtcatgagacatcatcggtaaataaatagtatgacctgcagtcataaatccaactttatacaaattaagcactttactaattggattagatttaatcgacaagtattgtaaacgttcaattcgactcgtttcttctttatatattaaaaatgatgtacgatattgtacacttagttgatcaactttataaaagcgacaatgatattgccataaaggcttaatacataattttaatgtactcagagcacctaaaaccaacaaaatataaagtaagtaatgtggccattcaaatcttaaccatataaaataaaaaatgacatacacagctacactcaatataaattctaagccattcgtaatgtaataatacaacaatgctgacttaggactcttagacaacttagtataatctgacatatacccctctccccaaataaaaaattatacggatttataatctatttcattttatttttatatgttgctaattatagcatatggaatatttcatgctaatttattcttcctaaaggtacatctaaaaatttagttaagcagaaagtgcttgaatcgctaaaaagacaccatgttataattttatcaacatgatgcctttcatctataatcaatctttcatcttatcaagagcaatatttagttcaagcacattcacataatcatttgttaacacaccacgctgcttacgatgttgaatcaagtcggccactcttgaagtagatatatgacgagcatcagcaatacgaggtgcttgcttcaatgcattttcaaccgtaatatgcggatctaagcccgacccagaacttgttgcagcatctattgttacatttgaattcccaaatttaacatgatgtttcatgcgtgctattaattcggtgtttccattcgattcattacttccacctgatgatacgccgtttttatataatttttcaggattcatattataatcaactgcactcggtctcccgtgaaaatatcgtgtctctgtccagtgctgtccaatcaattttgatcctactatacgattgtcatacgtaattaaactgccgtttgcttgttgataaaaaaatatttgaccaattaacgtgatagctaacgggaataaaaatccacataataccatagttattatcgttaaacaaatactatttcttatcgtattcatggtacaggctccttcctctttacacaaaaaattgtacaatcatatctattaatttaatgcctaaaaacgggacgattaatccacctaatccataaatcaacatattatttataaaaattctatcaatgctgtaaccctttacttttacacctttcatagcaattggaattaaggcaacaatgattaatgcattgaatatcaaagctgatataattgcagatttaggtgacgataaatgcataatatttagtgaagtcatttctggaattgttgacatcattagtgcaggtaaaattgcaaagtattttgctacgtcattagccaaactaaatgtcgttaatgcacctctcgtcattaataattgtttgcctatttttacaacctctattaactttgtaggattcgaatctaaatcaattagattagctgcctctttagcactaattgtccctgagttcatagctaatcctatattcgcttgtgctagcgcaggtgcatcatttgtaccatctcctgtcatcgcaacaatatggcctttcgcttgttcatctttgatgactttaattttatcttcgggtttacactctgcaacaaatctatcaaccccggcttcttttgcaattgtagctgctgttaaagcattatcacctgtacacataactgtttcaatccccatttttctcaattcagtaaatcgttctacaagaccatctttaatcacatcttttaaataaatcacgccaagcatgacattgttttcaatgactattaatggtgtgccacctttactcgatacatccatacagagagactcaatattaagaggaatattgccttgttgttgtttgacaagatttatcatactattaggtgcacctttgaataccgatatttcatttgtaatgattccgctcattctagtttcagctgtaaaagtcttatatgtgccatcaatgtctttaggcagctcatttatatacatctgcttcgctaatcgtacaatactttttccttctggcgtatcatcgtagattgatgacatataagcagcgactatcaatttttccagcatttgttgattcactggtaaaaattcactagcgattcgattgccataagtgattgtgcctgtcttgtctaaaatcattacatcgacatctccacatacttctacagcacgcccacttttcgctaatacattgaattgagtaacacgatccatgcctgcaataccaatcgccgataacaaaccaccgattgtcgttggtattaaacatactgttaacgcaatgagcatcgcaataggtaaaattaaatgcaggtaagatgctattggatataacgttacaataacgactaaaaatataattgttaacgttgttaataatgtaaaaagtgcaatttcatttggtgttttatttctttccgccccttcaactaaggcaatcattttatctaaaaaagatgtacccgcttcactctcaacacgtatttctaaccaatcagatgttacaagtgtaccgccaatgactccatcaaaatcgccacctgattcttttatcacaggtgcagactcaccagtaattgcagattcatcaacggttgctaatccatttattacaacgccatcagcagggattgtttctccattttctacccgaatattttgtccggcttttaactctgtggcgttcactatccgatacgcaccattttcttctatcaatcgagcagttaaatttgattgtgcttgtcttaaactatcagcttgcgcttttccacgaccttcagcaaaggcttctgaaaaattagcaaacaatatagttattaataatatgataaaaattgtaatcaaataacctcgcgatagataactagttccaaatatgtcaggaaaacatattaatatcaacgttaaaatcattccaacctcaacgacaaacattatcggattttttattaattgtttaggattcagcttataaaaactcattttcaaagcttctatcaccattgtttgattgaaatatttatttacatgatgcattttttccatccctttactttattttaaagttaaaaattcaccaataggaccaagtaatagtactggaataaatgtcaaaccacttagtaaaacgataaatacgattagtgatacgccaaaataaggtttatcaatcgctattgtatatttatcttggtggtatgattttttattcactaaacttgatgcaatcattaattgcaaaataattggtatataacgagaaagcaacataatgattcctgtagagatattccagaatgttgtatcatctttcagtccttcaaaccctgatccattgttcgcagcagctgatgtcatttcatacataacttgcgaaataccatgaaaagacggattcgttatactttcacttgctccaggaatcataaaagcaagtgctgaaaatactaaaattaaaattggatgtatgagaaagactaagacaatacatttcatttcacgggcgccaattggcatatttaaatattctggtgttttaccaaccatcaaactgcatataaacaccgtcagtaagacatatatcaataaattcatgagtcctacgccttcgccaccaaatacaacatttagcatcattaataccattggtcctaatccacctaaaggcgttaagctatcatgcatgttattaacagaacccgttgtaaatgccgtcgtaataactgtaaatagtgctgacaagcctgctccaaaccgtacctctttaccttccatattcggtccataaatgcctaaattcgctagtattggattaccacgatactcactccacatagttaatgtaagaattgctataaaaatgaaaaacattgcgacaaataatatcaacgcatgacgatgtactcgtttaccatgtctacttaacatgcgaccaaataagaacaacattgacataggaagtaacatcatactgcccatttctataaaattgctccaaatatttggattttcaaaaggtgttgcagaatttcctgctaaaaatcctccaccattcgtaccaagatgttttattgattcaagtgatgcaataggtccaaatgcaatatgttgaatatgtccgcttaaagtccgaatcattaaattagcatgcaacgtttgtggtacaccttgagtcatcaataaaatactaattaaacatgataatggtaaaagtactcggacaataaaccgaacaatatcttgataaaaattaccaatgatattagttaatccagttaaacgtctcaacatcgctatacaaacggcgtaacctgatgcactagatgtaaacattaaatatgtcattacaatcatttgcgttaaatatgtcacatctgattcaccgttatagtgttgtaaattactatttgttaaaaaagatattgctgtattaaacgctaaatctatcgattggtttaaattatgatttggatttaaaaaaagccattgctgaactattagcaatacaaatgttataaaccccataaatccattaaatgccagaaaatgtttgacatatgttttagctgacatgtgttctaaatctgtgccgataattttaaaacacatattttcaaatctagtaaatattaaatctactcttgacgattgcaccaatgctacgcgatatagatatccactaaaaacatacgtaatcataaccatcattgttagaaacaaaattatttccatgataaccctcacttaatatatttctaaaatttttcactacgaattaaggcataaaataaatacaaaactaatgcaataactaccagtaataaaacgatgagcattgtcataacctccttacaacacaacaacatcgtaacaacttgtttatgagagaaatattaattttcaaacttagttattaagaaatcattaagatgtgtatgcagaaataaattttatagcatttaattgtgaagaatattatgatattgctatcgaggtgaaggttatgtcaaacactgaatcgctaaacataggaaaaaagcgtggatctttaacaatttacatcggttacagtccaggtgttggtaaaacatttgagatgctttcaaatgccattgaactatttcaaagtaacgttgatattaaaataggatatattgaaccgcatcagcgtgatgaaacaaatgcattagctgaacaattacctaaaatcacaaccaattttactaaacatggtagtcatcattttcaatatttagatgtcgaccgcataatcgaagaatcgccgacaatagtacttatcgatgagttagcacatacgaatatttctagagatcgtcatgagaaacgatatatggatattgaagaaattttaaatcatggtatcgatgttcataccactttgaacattcaacatattgaaagtttaagtagtcaaattgaactgatgaccggtatacatgttaaagaacgtgtacccgactatttcataatgagcgccgatgtattagaagtcgtagatatctcacctgaacaattaattaaacgcttaaaagctggcaaggtatataaaaaggataggctagatgtagcatttagtaatttctttacgtatgcccacctaagcgaactgcgtacattgacgttaagaacagttgccgacttgatgagtgataaagaaaaagtccgacacaatcataaaacgtcactcaaacctcatattgctgtggcaattagtgggagcatttataatgaagcagtaattaaagaggcattccatattgctcaaaaagaacatgcgaaattcactgctatttatatagatgtattcgaaaaaaacaggcaatataaagatagtcaaaagcaagtgcatcaacatctcatgcttgcaaaatcattaggagcaaaagtaaaagtagtttatagccaaaccgttgcattaggattagacgaatggtgtaaaaatcaagatgtaaccaaattaattatcggacaacatattagaaataagtggcgagactttttcaatacacctttaattgaccatttaatgtcctttgaacatagctataaagtcgaaatcgttccaatcaaacaaatacctgttgaattgaaaatgaacaaatcaccctatcgtcctaaaggcaaacgtttcgccatagatatgttaaaaatgattttgattcaaataatttgtgtaatgatgggactgtggatttatcaacttgataagcatgagtctagtacgattattttaatgatttttctcatcggcatcattttgttatccatttggacgcgatccttcatcattggctttttagcagcaattattaacgtatttgtttttaattatttttttacggaacctagatatacatttgaagtatatcgctttgactatcctattacatttatcgttagcattttaacaagtattttaacgagtgctttattaaaacaaattaaattccaatactccattactaaaaagcaactttatcgtacagatttattatttcaatttaatgattcgattaaacaaacttatacagttgaaaacttactaataaatgctggataccaaattaatcaattattgcaacaatcaattactatatacgttatcaatcaatcgaaagtaattaaaacaataccattgcaaaaccatatcgataatacgactcaacagcatgaacaagcattaagctgggtaattaaaaatgaaagacaagctggtgcaacaacagatacatttccaggcattaataaatggttgataccaattggcacatctccgattaaaggcattctagccattgattaccaaagttctcaagtgattaatccatatgatgcatcaatattagaatcaatgttaaatgaactttctctcgccgttgaaaatgtgacgttacttaaacaaacgagagaatccatgttacaggctgaacgtcaactgacacattcaaattttttaagatcaatttcgcatgacatacgtacaccgttaacaacaattatgggaaatttagatattttagtatcacatagtaaagatatgtctatcatagaaaaggaacaattacttgtgcatagttttcaagaaagtcagtatttatatctattagtgacaaatattttatcattaacaaaattacagtcatcaaatgttcagataaaattgcaaccttatctcgttagtgaattagtagaagaaatcgatatgattctagaacgtcgccatttaaaaaagcgtataactgtatcatcctcagtagatttacagtttatacacattgacagtaagttgattttacaagctttattcaatttgattgaaaatgcagttaaacacacttctactgacaccaaaatcaatttatctattcgttatgctagcgatgaacaaatcgaatttgccgttatagacgaaggacctggaattagtttagaagaacaacaaaagatattcgagcctttttacacaggatcaaataaatattttaaagataaccaaaaagaaagcatgggactaggcttatatttagtacagactatcctacacaaacatcaatcaaacttacaatataaaccgaaccaaccacacggcagtatattctatttcaatatagatacagactttaatgaaggagacgtataatgcaatctaaaatattgataattgaagatgatcacgcaatcacacatttacttgatgttgcattaactttagattattacaatgtaactacagccgacaatgccacacaagcacactttaaaattcaaattgataaaccagatgtcattttattagatttaggtttaccagataaagatggattatgtttgatttcagaaatcaggcaacatactgacattcctatcattgtaataagtgcaagacaagaagaacaaacaattattcaagctttagataacggtgcgaatgactatatgactaaaccttttaatgttgatgagcttcgggcacgaatacgagtcatcgagagaatcgctaagtcgcatcaagaaactaacattgtatttactaacggtttgctaagcatcgactttggctccaaatctgttgttattaataatcaggaggtacatttgactccaaatgaatttagcttgttagaactattgtcaaatcataaaggaaaagtactcacttatgagatgatattaaaacgaatatatggctatgttaataagactgaaatgcctagtttaagagtgcatatgacatcattaagacaaaaactttcacaatgtcatgaggacgcaaaagatattattaaaacacatccacgcattggttatcaaatgttgcagtggaaagagaaataattaaataaaaaagatcctgccattaaacgaatgattggcagtgatcttttttatattcaacttattatttatcgcgcactagcgtcagcaaaaagccctattatttttttacaagaacatgatactgaaatttcataaagtttatttatgttcgattattcttaatttaaaaatagttctttaaattatatactcaccacatttggtggagaaccatatttacacagaatgatataaccgcatacagatctcaatccaattaaatatttaacctttaaaacgttagtactttgatatctacagagaatcaattattgaaaacaaaaaagagctcaagacattacatctttaagctcttaatctataaattatttttgatggtcagcaaatgtgcgacctttcataggtctgcttccaccgctgctcttctctttacggtcgaatttttttgtacttttctttttacttgagtatccttttgaacgtttactcttactgtcaaatttaggattaccacgcttactatttctgttacgagaaccgcttggtttaccgttacggcctttgcgagataatggtttttcaaaagttaattgaacttcaacttcatcgttcgcttctactaactcttgtaaaagtgcagcaactaaatcaacatcgttatattcatttaacaactctgtagaaatgcgtttcaagcgtgattctgactctttagacatccagttttcaactttttctttgatgtcatcttcacgtgcttgaagtacttctttacgatgaggtggacgaagtgcgctcatttttctaccattagcatcttcaatttgtctaatgtaatccatttcaattggatttacaaatgttaccgcgataccttctttaccagcacgacccgtacgaccaatacggtgtgtatagctttcagtatcttgaggtatatcaaagttataaacatgactcacaccagaaatatctagtcctcttgctgctacatcagtagcgactaaaatattaatttggtcatttttaaatttctttaatacttctaaacgtttcgcttgtgtaatatcaccatgtaagccttcagctttatatcctttagaaatcaaagcacttgttaattcatcaacacgacgttttgtacgtccgaatacgattgctaattcaggttgatgaacatctaggaaatttgtaaatgtatcaaatttctctaattctttaacaattgtatagaattcttcgatttgtggatcagacatttcattattcattgtcttaatgatttttggtgatttcataaattgttgtactaaagcttggattgctttaggcattgtagctgagaacaacattgtttgacgttgtactgctggaattttatccataataaatctcatatcatcgatgaatcccatattcatcatttcatcagcttcatctaaaatcaaagtatgaattccgtccgtttttaatgtgcgacgatttaaatggtcgataacacgcccaggtgttccgactacgatttgtgggccttttttcaaggctttaatttggcgttcgataggcataccaccgaatacagtaacaacttggacaccttgtccacggctaaattctcttaattgttcagctacctgcattgccaattctcttgtaggtgctaaaatcaacgattgaaccccttgtttccctactactttctcaattaaaggaataccgaatgctcctgttttacctgtaccggtttgagcttgcccaaggatatcaattccttgtaacgcataagggatactgtctttttggataggtgtcggctctttaaatcccattgattcaagtgactgaaccgtattatccgaaatccctagttctttaaaattttgcaaaataattctcctttttacctgtttatttctcaatatacttttgcatataagttcattaatatttcatcaacttctatatagtaccaccaaaaaaatttaatcgcaataaagcaatttgcgaatatttattagaatcacattaattgattgtcatatttttgtcaaaaagctagcattagataagatgtaagcgttacgcatcattcgaataatcattataaaaaattttttataaaatacgtatatcgttaacattccacaacaaattttactgaaacacatgtgaaattagacattataatactacatctttttgtaaaacattatataaacattcaaactacttcctatataaagtgtgtacatagaattaaccttgatttagtttcaaatttatagatttaacataaaaagaaaaaggcaattttgtatttacacacaaaaccacctcttctttgtaatcttttagtattaattcaaatcatttttataagtaaaaggtccctcgactaatctctatgaaattaaagcatttaccacttcttctaatttcataccacgtgatcctttaactaatacacggtcatgcgcttttaaatcgcttgttaaaacttctatcatatcgtctttagaattgaagtgttgtgctttttcgacatgttgctggcccgaatcataaatatacttcgcttcattaccaaacgtatacaacacatctatatgcttttcttctaaataattacctacaccgatatgcatttctttgctattttcacctaattctaaaacatctcctaaaattagaatgcgacgccctgtcaaagtactcagtgtatcaatagctgctctcatacttgtaggacttgcattataggcatcatttatcacagtaatatcattttctaatgtatgttgctccatacgcataccagttaagctgacattttttaaattttgatagattgtgttatatgtcaaacctaattcatgaccaaccgcaatggcaatcgtcgcatttttcatattatgctttcctaatattggtagatcataatgttctttattattaatcgtaaatgaaatacctgtagtatctctatcatcaacagaacaaactaatgcattatcagtagcaacaccgatactaatacattttgcattttcaacttctttaacatgcggtttcaataatggctcatcgccatcatatataaacgtaccattatcttttaaacctattgtaatttcagatttagctttagcaatcccctcgcgcgaacctaaatcttgcatatgtgactcaccaatattagttataactgcaatatctggttgagcgaggtttgacagaaattcaatttcatggaaacctgacatccccatctccaatattgatatttcagtatcattatctaattccaaaatagttaaaggtaaaccaatttcattattgtaattaccttgcgttttcttaactttaaattcggtatgcaatacactttcaatcatatctttagtcgttgttttaccattagaccctgtgacggcaattactttagggtttacatgtctcaagtaagcttgtgccaattgttgtaatgccgttaatgtgtcttcaacccatataataggcccgcttacattttcatctataggtgtccctctttgataaaaagcagctccagcaccatcttgtaatgctttagagacaaagcgatgaccgtcaacattttcacctttaaatggtataaataacatatttttagaaattgctcgtgaatcaattgtgactccatttatcacttgatttaaaaattgatcttcaatttcacaaggaatccatgattgaatttgctttaatgtaacattaatcataataacaacctcagttagtcaattttgtatttatttttctgtttatcctggtgacgttctttagcaagctcgataagttttgtaatcagttctggataagataagcccatattttcccataactttggatacatactgaaagccgtaaatccaggcattgcatttgtttcattaatatatatttggttgtcttctgttacaaagaaatctgcacggactaaaccagaacaatctgtcgctttgaatgcctctaatgccatatttctaagcgttaattgaacatcttcgtctaagtcagctggaatttgtaattgaaccttaccatctttatattttgatttgtaatcgtaaaacgcgacatcttttacgacttcacctggccatgtcgcttcaggatagtcatttcctaaaactgctacttcaatttcacgtgcgttaacgccttgttctataacaagcttacggtcaaattggaatgcttctttaataccttctttaagttccgcttcattattacatttactgatacctacacttgaccctaagttagcaggtttaacaaagactgggtaatttaatttatcatttactaattttaaaatgttatgttcatatttttcatattcagaacgtaagaaactaatataaggtaactgtggtaaccctcgatgttcaaataattgtttcattacaagtttgtccatagaacttgcagctgacaatacaccatttcctacatatggtacatccaaaacttcaaaaagtccttgaatcgttccatcttcaccattaggaccatgtaataatgggaatactgcatcgtatggttgtcctgaactactttctttcaatagctgtgaaatctcaagcgcctctccattttctaaatgaagctcatcagtagatataatttcagctgtaatattattttgctttctccaatcaccatcattggtaatataaatgatatcaacatgatatttgtctttatctattgcatttaatacattttgtgctgtcagaatcgatacttcgtgttctgcacttttccctccaaaaacgatacaaatattttcttttgtcatttcgttttcctccaatgatatatcagggtttgctaccttaatataaattaatattgatttattcgcatctttgaatcttaatagtatcacattttaatgctattttgcattttaaaaacgaggcgttatgtgtctgtatctatgttgattcatttataatcagaacaatattcccctctattttattcctaattcaaattgaaatctatagctgatatcactgtgatattctagctaatttttaaaaagtcatgtaaaattgatataaacattagtgagtataaaaggagtttgcaatgaattattcatctcgtcaacagccggataagcattggcttcgcaaagtagactgggtattagtagccactatagctgttttagcaattttcagtgttctgcttattaactcggcaatgggcggtggtcaatacagtgctaatttcggtatcagacaaattttttattacattttaggtgcaatttttgcaggtatcatcatgtttatttcacctaaaaagattaaacattatacatatttattgtatttcttaatctgtctattattaataggcttgctcgttattcctgagtcacctattacacctattatcaatggtgccaaaagttggtacacgtttggccctatcagtattcagccatctgaattcatgaaaattattttaattttagcattagcgcgtgtcgtttctagacataatcaattcacattcaataaatcattccaaagtgatttgttattatttttcaaaattattggtgtctcgttagtaccaagtattttaatattactgcaaaatgacctaggaactacattagtattagctgcaattattgcaggtgtgatgttagtaagtggtataacatggcgtatcttagcacctatctttattacaggtattgttggtgcaatgacagtcattttaggtattctatatgcacccgcattaattgaaaatttattaggtgtccaactgtatcaaatgggacgaatcaattcatggcttgacccctatacatatagtagtggcgatggctatcatttaactgaatcacttaaagctatcggttctggacagttactaggtaaaggatacaatcacggtgaagtttatatacctgaaaatcatactgactttatcttttcagtgattggagaggaactaggttttatcggttctgtcatattgatcttaatatttttatttttaatcttccatctaataagattagctgcgaaaattgaagatcaatttaacaaaatctttatcgttggtttcgttactttacttgtgttccatattttacaaaatattggtatgacaattcagttgttaccaatcactggtattccattaccatttattagttatggtggtagtgcgctatggagtatgatgactggaataggtatagtcttatcaatttattatcatgaaccaaaacgatatgtcgatttataccatccaaaaagtaattaatttaaactattttgagtttcaaatatcataacttttcaagatgacattatatagtctatttatatcgtcgatttaaaatgtcatatatagatattactcgataataacaatccctctttgaggtacacatgtaaaatgtatactctaaagagggatttagttatatactacttgctttcattttagtaaatccagtcaaaaaagctatcatcgaatagtccaacgatagctttaacggtgtgtgattcacaatcacagtcaattattttaattcgtgacttactttattagatgctggcaaagtattaataatgtctaaacgagatttagtttttttaatattcacacctaatgatgacaatagtttgactacattttgaatcttttcaggacgtttcattattatcacctcgtttggatcgctttcaatattatcttaccctattcgacatacctttactacatcatttacaaaatttttaatttattttcaaaattaaaatctatagcgcactctacattataccctaaattacaattttgtatccttcatcatagatttctttttcaatactattcaaatttgctggtgtctcatacgatacagttacttgaccatctattatattaatattcacttgatgaacacctatcatatttgaaatgcgttctgtcaattgacttacttgttcttctgtttcaattcccgctgtgtaaatcgtattttgatgtatcatcttaaactcctttagtctttaatcaatttttgaaaagtcactaataactcttccatcgcctcttcctgagcaccttgattaactttattcataatacaacttttcatatgttgttctaataactttatcgcaacactgtttaacgccgaacgtgtcgctcttatttgcgtaaggacatcatcacaatagacatcttcttcaatcatgcgattaatcgctctcacttgtccttcaattcgatttaaacgtgatttaagattcgtttttatttgttcagaatgatgtgcattatcttgttcagtcatagcattcactccttcatttacattctttactatactatatcccataaaacacaacgtcaacacaaagtgtgtttttcaaactaaattgtcatgatatttaaattgcttcatgatacaattaataagatatactactcgtttaagattttcgatgggaggtttcaaatgatagagttattatccattgcactcaaacattctaatattattttaaattcaatatttattggtgcatttattttaaacttattattcgcctttaccattattttcatggaaagacgttctgccaattctatctgggcttggttactagtcttagttttcttgcctttattcggcttcattttatacttactattaggacgacaaattcaacgtgaccaaattttcaaaattgataaggaagataaaaaaggattagagttaatcgttgatgagcaattagctgctttaaaaaatgaaaacttttcaaattccaattatcaaattgtaaaatttaaagaaatgattcaaatgttgttatataataacgcagcatttttaacaacagacaatgatttaaaaatatacacagacggccaagaaaaatttgatgacctaatacaagacatccgtaatgctactgattatattcattttcagtactatattattcaaaatgatgaattaggtcgtaccattttaaatgaacttggtaaaaaagcggaacaaggtgtagaagttaaaattctttatgatgacatgggttctcgtggactgcgtaaaaaaggcttacgcccgtttcgcaataaaggtggacatgctgaagcatttttcccatcaaaattacctttaattaacttgcgtatgaacaatcgaaaccatcgaaaaattgttgtaatagatgggcaaattggatatgttggtggttttaatgttggtgatgagtacttaggtaaatcaaaaaaattcggctattggcgagatacgcatttacgaattgtcggggacgcagtgaatgcattgcaattacgatttattctagattggaattcacaagccacacgtgaccacatctcctatgatgatcgttatttcccagatgtaaattctggtggaacaattggcgttcaaatagcttctagtggtcctgacgaagaatgggaacagattaaatacggttatttgaaaatgatttcatctgctaaaaaatcgatttatattcaatctccctattttatacctgatcaagcctttttagattctattaaaattgcggcattaggtggtgttgatgtcaatatcatgattcctaataaacctgaccatccgtttgttttttgggctactttaaaaaatgcagcatccttattagatgccggtgttaaagtatttcactacgacaatggctttttacactcaaaaacacttgttatagatgatgaaattgcaagtgttggaacagctaatatggaccatcgcagtttcacattgaatttcgaagtcaacgcctttatttatgaccaacaaattgccaaaaaattaaaacaagcttttatagatgatttagcagtatcttctgaattaacaaaagcacgttatgctaagcgaagtctttggattaaatttaaagaaggtatttcacaattattgtcacctatcttataaaatagaaatatgaggagtgtaactttaatgcaacaatcagacgtcattagtgctgccaaaaaatatatggaatctattcatcaaaatgattatacaggccatgatattgcgcatgtatatcgtgtcactgctttagctaaatcaatcgctgaaaatgaaggtgttaatgatactttagtcattgaactcgcatgtttgcttcatgataccgttgacgaaaaagttgtagatgctaacaaactatatgttgaattgaagtcatttttatcttctttatcactatcaaccgaagatcaagagcacattttatttattattaataatatgagctatcgcaatggcaaaaatgatcatgtcactttatctttagaaggtcaaattgtcagggatgcagatcgtcttgatgctataggcgctataggtgttgcacgaacatttcaatttgcaggacactttggtgaaccaatgtggacagaacatatgtcactagataagattaatgatgatttagttgaacagttgccaccatctgcaattaaacatttctttgaaaaattacttaagttagaatctttaatgcatacagatacggcgaagatgattgctaaagaacgtcacgactttatgatgatgtacttgaaacagttttttacggaatggaattatcacgactagacattgaagttgtagtatgatgatgcgatgtaatggcgtgttgttgtggaagcttggtgtcatgccatgttactttgatgtgttgttgtggaagcttggtgttgatgccatgttactttgatgtgctggtgctacgatgcgacttgatgtagtgctatgatgtggcattgcggtgttatggtgttatagaccggtttggcgtcgatgccatgccgttacgattctatgatatgttgttgggacgttgcaatgtgtattatgccgttgtgacgttattatttcacactgttacatgtataagtgaattgctgtggaaatttgcgacatatactgctacactgatgaatcattgtgtcaagatgacattgcgatgaagaatgacaactctgttattaaccactttttacatactgaaaactcgttaatattatttcaaataaaaacagcagtaggatgactttcacatttgaaatcatcttactgctgtttctatttatcacatattgtataatgtgacactaagtttcgcttttgaagcgaaaaataatgtgcgccctataaagttaaaattatattcaacttttagggtgcacattatttggacttgctaaggttatttctttttctttttagacactacttgtgtgtttttgccttttttattgctgccgccgttgtgctctctttcatacgcttcaatgaaaggttgtacttcttttttagcgactttttcataataaatgttcgcaaagtgtgtttgaactacaaggaacgccgcactgactgaccagtacaaaccaagtgctgatgctgagcttaatgaaatccagataatcataattggtgaaatgaccatcatcatgtaacccatttgacgttgttcgtctggcatcgttttacttgatacatatgcttggataaagtataaaacaccggcaataattgtaatccaaatatcaggacgtcctaaatcgaaccataagaagtgtggatatttaaacaaaccatctacaagttggtctttaagtacaaagtataatcccatgatgattggcaattggattagcattggtaaacaacccaacatactcttaatcgggttcatgtcatactttttatatacttgcattaattcttggtttgcagccattttttcttcttgtgtacgcgcacgtttcactttttcttgaattttttcaacttctggctttgcaactttcattttttgacgcatcatatgactatttttatagtttgacaacatgaatggtaataaaataatacgaattaccaatacaaggataataatagctaaaccataattgtcgtttaataagttatttcccaaccaatccaatacatttttcattggatctacgaatgtattgtagaaaaacccactacgtttttcaggtttagaatagtcacaaccagccaaaaagaccataatacctaaaaataatggtagtaacgcttttttcttcatttttccacctctatcattatattcacataggatttattctatcacattaatgagtacgtatgaaacaataagtggaaaaatttaactaattattaaaaaaatctttgaatcgattaacagtattttcaatattttcacttttagaaatggctgaaatgactgaaattccattggcacctgcttctacaatcggcgccacattattagtattgataccgccaatagctacaatcggtagttgcggattcatttctttaaacgttgcaatcatttctggacctactggtatatgcgcgtcatgcttcgacggcgtaggatagattggtccaacacctatataatcaacatgagttaaatcagattttgcatactcatctaaatcactaatactaagtccaataattttatcagtgaaatattgtgctatctctttgactttcgcatcatcttgaccgacatgtataccatccgcgttaatttcttttgccaaggatacatcatcattaacgataaaaggcacatcatattgatgacagagatgctgtaattctttagctaatacaagtttatcgtttccttttaaagctgattcacccttttctcgaaattggaaaagtgtaatccctgcctttaatgctgcttctaatacttcatgaatagttcgatgactcggaacatcggaggtcccacaaataaaatacacatttagatacgattggttaaacatatttttccacctcttgaatacgaatccgttgttgataggttgtttcatttaaatgatataacgtatcaagcaacaatggtgaaaacgtaccaggaccaccacaattttcattttcagcagctacctcagcagcaatattaaatacgcttaccgcttcaattaacgcttctatgtctggttctgtttctctaaataaaaatccagcaataacgcctcctaataaacaaccagctccagttactcgtgctaataatggagatccattagctaatacgatggctttattatcttgaacaataacgtcctctttacctgtgattactattgcagttttatatgttgcgtaagcctttttcgctattgtaaccgcatcaagattagcatcactatctgtacctttcatagttgctgtatcatcaatcaacgctaatatttcagatgcattgcctttaattactgatactttcgctgatttcaataataatttacaaaattgctttcgatatgtagaagcaccaacagctacagggtcaaatacaataggtaagcctgcctcatttgccgtttgagcaatcgcaataatatcttgttcattttctgctgttaaagtaccgatattgattaatagcccttgtgcaactttgtaaaattcttcagcttcttcgggagcttcactcattgcagggctagcaccaatacttaataaaccattcgctgtaaaatttttaactacatcgtttgtataacaaattgttaatgggttttcaatacgtattttatttagataattcatcgtctaatccctctttctttaaatatgcaaaatgattcactggacctctaccacggccgatttcaggcgtatattgtatactcattgaaataaactttttagccttgtgtacagcctcaaataatcgtctaccttttgcaagttctgccgttataactgctgaaaatgtacaccctgttccatgcgtatgttttgttttaaatcgttcattttcaaatgtttgaacaccttcgttagtaaataaataatcttttgctatatcagtatcatttgaatgaccgcctttaatgatgacacctttactaccaatctcattaataaagatgcggccagcctgcataattttttcttcactatcaatggttagtcccgttatttcttcagcttctggtaaattcggtgttactacgtcagctaatggcaataacgtatgctgcaagttttgctttgtgtcattatccattaatgaatcaccgcttttcgccaacataacaggatcaattacatatggaatagattcatgttgcattaaataatgacgaatcgtttccatagtatctgctgtagcaatcatccccgttttaatagcatgaggtaaggtatcattgaagacactatcaagttgttcatctacccattgatgatttaaattatgaatatgttgtacgcccaatgtattttgagcaacaatacttgtaacgacgcccataccatatacaccacatgaatgaaatgattttaaatcagccattacgccggcaccacctgttggatcagtacctgcaatggttaatgctattttaggtttaatcatttacttttcctccaaattcccattgttctagtgtcatagccatattgaaaaatcgacgctcatgtatgcaactttctaaaaatacttgctttacttgttccaattccttgtcagacattgattcggctaatttattcattaatgcctcaaatacgttaattatgtcatccatttcagtactataaaaatcaaaccattttgccgtatctttttctctattaagcttatgatcactttgagagcgcttagctaattctgcataaatatatggacaaggtgccattgcagcaattgtataaatagcattttcacgactatgcgcttggaaatacatatgttttatgtaatggtcgccacttggaggccaaacttttgttttaatgatttcttcgtatgattcaccaacaatttgcgctaaaatatcatgcgcaagtacttcaccttcaaccataaattctatttgctctactaaaaattttacgtcattcatgctattcatttttggaattaacaaagcatataagtttgtaaattcttttaaatacgcagcatcagcttttaagtaatggcgtaatgcgtcagctcctatatctccggataacatcttctgaataaagtcatcctcataaatatcattaatgattggctttgcagcttggtacaatttttgtgaaaattccattgtaaaaaatcctccctaaataaaaaaactacttccaacatgaaagtagtttgatggcaatgttgctatactagccccatcacttcaataactactttcctacgttggtactaaccaaatcaggtcataagggtctgaacaattcatctcagccatatcattaggctcccctagtagttccttagtattcaattgcaaattaatcttagcaaacggtttcaacattttcaattattgttgctcagttgggagtgggacagaaatgatattttcgcaaaatttatttcgtcgtcccaccccggcaaggttgactagaattgaaaaaagcttgttacaagcgcattttcgttcagtcaactactgccaatataacttcgtagagcatagaacattgatttatgtcccagcctgtataatgacatatatttgcgaaataaaaaaaccggaacatatcgagaattccccgatatattccaatctaaaagttacttatataactattaattagctatgcataaatggcttatgcagtaacccaatgtccagcgccaccagtgttatataattttactgctgcggcatcttgaacactttcaggagcatttgctggtgatacacctttatatttagcaggtgctactgaatcccaagttgattgtaagaattgatacttaccagctgcacctgatgttggatttacagcatgaatattgccacctgattcacgttgagcaatttgttttagatgagcattcacatttactgatgaaccttctgatgattttgattcagttggtgttgcagtaacttgtgaattgtttgatgttgatgcttgtggttgttgagtttgagcattttgtggtgcttcaacttcttgtgattgtacttgattagcttgaacagctgatggtgcaacattattagttgcaggtgcttgtgcactcatgtctgctccattagtacctgttgcatggtaattccaagcaaagtgtgtaccatctgattcaaagtgataagtaaacccttcatagtcaaatgtataattataagccccagcttcaattggtttttgatttaatgtttgatcatttgattgcgccatttgcgctaaagatgctttatttaagtccgcttcacttgcatgggcttcgtgacctgcatttcctgctacgattcctaaacctactgctaatgatgatgcgagtaatgttttcttcataatcttaaaatcctcctacaagtaatttgtttctctaaaagttttacagagactactgtaacatctataaaatccgtgcaggttacaacaaaataaaaaaatagccttgttttttacacagtgattacaacgaaatcccccataatttcagatatgattctatcgagaattgtcatgacagtaaaaatgttttttatttgcaattttttatgtaatcgttttgcaatctatgtctattttctattagaaaaactacacaaaaagacgacctacacaacagtactagtcatgtaagtcgtttttaagtgagtatatttcaagttaattagatctataaaaaatttaggatggattaaatgtatattaaggatgtttaggataattggatttaaatttctaataagtcatgattatctatattttgagagtcaatatctaaaatactatctgagagaatttcattattttgggatttaggggacataaattttattgtttcaacatataattcagtgacaaagtgtgtttgtccgtctttatcatactttcttgatctcatttgaccagttataccaaccaatgtaccttgattagtatatttttctatattagaagctaacttgccaaatgctttacagaataagtaatcacagacgatttctccattttcatctttataatttcggtgcgttgcaacacaaaacgttgcaatttttctatcctccttttcaaatatttgtgcgtctttcgtcagtctctcgacaattacgattttatttagcatgtagtgtgtgattcacctcctatgcctatatcttaattactagcttaaaaatggtcaaaatggcaaattttatataattaatagctatagcatctcgttatttgttatatttaaagaaattagtcatgaaatgaccttaaatcttctaaataattcaaaaatcataaatattaaactaatgggatgtgggaatatgaaaacttttaaagcagtaaggtttcaaattgtgaatgaacacggcagaattatagaatatgaattagaagatggcgtaataattaataaagaggaaagtggcacgggttggttgcttgaaattgtcatttctaatgagcattatgaaacatttaaggaatatcaagacaatgaacagttattggatattcgtgtcgtcatcacgcgtccagccaatgatccagctttatttgaatctactgtgaaaagtattaaaaattttaaaacaacaatgtctatcgtatttgaatgtcatatttacactttacgtcaacagtatgctgaaagtttattagaacaacttattgatgatggattatctggtgaagaattaaaaaaatcatttaatcgaatgatgcagtctaaaccaaagttaaaggatgaaaaattagaagagtaaaataaaaaacattcaaagattttgccaacacattaaatctttgaatgtttttttgttttattttacatcttgaattgcaaatgtaagttcacaactacaagcaagttgaccatcgacagtagctttagcattacctttaccgattggtcctttaattttagtgatttctacttccaacgttaaagtatcaccaggtactacttgacgtttaaaacgacatttatcaataccagcaaataaagcgattttacctttattttcttcactatttaaaatagctaccgcacctgtttgagctaacgcttcagtaattaatacgcctggcattaccgcatactcaggaaaatgcccttgaaagaatggttcgtttcctgatacttgtttaatagccacacaacgttgaccttcttcatattcaactactttatcaattaataaaaatggctgtctgtgaggtataatttgtttaatttggttataatcaaaaattgtttccatggttgaaatcctccattatattaatttactgaattaatcgttaatacgttcaatgtctgcacctaattgcttcaatttaccgtgtaagtcaacatagcctctatctaggtgcgttaattcagtaacgcttgttttaccatcagcaactaatccagctaaaattaaggcggctgctgctcttaaatcagtcgctttaacttgtgcaccttgcaattgacttttaccttcaagtttagcactacgaccttctacattgatattagcattcatacgtttgaactctgcaacatgcataaaacggttttcaaaaactgtttcggttacgactttatgaccatttgccgttaataacaatgccatcatttgtgattgcatatcagtcgggaatccaggatgtggtagagttttgatgtctacaggttgtaattccccttcagcacgtacacgaataccatcttcttgatagtccaattcaacgcccatttcttctagtttatagactaaactcgccatatgttctttgattgcaccacgtacaaaaatatcaccacgcgttatagcaccagcgattagtaatgtgcctgcttcaattctatctggaatgatagcatgttctacaccatgtaatgattctacaccattgattgtaattgtgtctgtaccagcaccagtaattctaccacccatttcattaatgtagtttgctaaatcgacaatttcaggttctttagctgcattttcaattaaagtcttacccttagctaatgatgctgccataataatattttgtgttgctcctacacttggaaaatctaaatgaattgatgtaccttttaatccatctttagcattagcataaatattaccattttcaagatgaatttctgcgcctaaagcttcaaaacctttaatgtgttgctcaatcggtctacttccaattgcacaaccaccaggcaatgcaacaatagcatgtcctagtcttgctaaaagaggtcccataactaaaatacttgcacgcattttactaacatattcatatggtgcctcttcatttagagtctttgttgcatcaacgacaacagcattttcgtcctttttgtatgtaacgtcagcatttaaagttgttaatacattatttattgtttctacatcacttaaagctggaacattaactaatttgctcggtttatcagaagctaataaagatgctgtcaatattggtaatactgcatttttagcaccttctactttaacttcacccgttaatttatttccacctttgattactattttatccatcgtaaatcctccacttagaactcctattactttacatttccctattttaaaattattttaagtcattatttaattatatctagttttgattacaaatcatagagttagacttattttattaaatattttacctgcgtcgagtattgtaacaaatctacaataaaattgcttactgcagtgcctaataaaatagcaacaaatatcatacacacttgtaattgagtggcgtatccttttttaaaaaattgatctaatctaattgattgtaaagcccaataggcaatacaaatacatacaacatgtaacactaaatggataactgcatattgtccgatataatccattttatcacctcataagattactgtattacattgtacatgaaaaatttaaataatgatacaaagtttaatacccgtttttagtaaagtttaagctaacttactatataattctttttacataaatatcataactataaagtatcttggtatgaaaaaatgtagctactttcaaaaaatgaaatgtcgactgtagatagtggtgaatgaaattttgattttagcaatctattagtgattgtaaaaaagtaaaactattcttgggagtcggacataaatcaatgtctagactctatagtgttgtatttggcagtagttgacggggccccaacataaagaaatactttttctttagaaattagtatttcttatacatgagttttactcatgtattcctatttttaaatacacattagctgtgtttaatgataaagaaccactacatcataaatctttaatagttctttatcaattccttcccccctctcatgttttgtatctttaaatcaatataattcaaaaaagggtcgaagatatgaaatcacatcttcgaccctttatttactattttaattcagccacacgcaaacggttatttgctctctctaaagctctttcggctctatgaatatcagtattgtcgtcatcattttccaagtgagactctgctcttgctttggctaatttagctctttcaacatcaatttctcttgcagtttctgcagtctgaacaatgattgaaactttatcttttctaacttcaacaaagccatcgcttacagcaatatattcagttccatcgtgaaatttcacttttacaaagcctgtttttaaagcagctacagttggaatatgtccactcatgacacctatctcaccagctgttgtttgcataacaacgagttcaacattatcacgattgtaaacagaaccattaggagtgacaatatctaggtttaatgtattcattatccattcctcctaattgttatacttcaacacccatatctttagcttttgcaataacatcatccatgctaccaactaaacggaaagcatcttctggaatatggtcatatttaccatctaagatatctttaaagtttgcaactgttgtcttaacaggtacataagaacctttttgaccagtaaattgttccgctacgtggaagttttgagataagaagaattgaattctacgtgcgcgttcaactgtttgtttatcttcatcagataattcgtccatacctaagatagcaatgatatcttgtaattcacggtatttttgaagtgttgattgtacatcacgagctacttcataatgttcttgacctacaattgatggttccaatgctcttgatgtagacgctaatggatccacggctggataaatacccatttcagttaatttacgttctaagtttgtagttgcatctaaatgggcaaacgctgtcgcaggcgctgggtcagtatagtcatcggcaggtacgaataccgcttgaatagaagtaactgatccttttgttgtagacgtaatacgttcttgtaattgtcccatttcagtagcaagtgttggttggtaacctactgcagaaggcatacgacctaataatgcagatacctcagaaccagcttgtgtaaatctgaaaatgttatcgatgaataataatacgtcttgaccttgttcgtcacggaaatattcagccattgttaaaccagataatgcaacacgcatacgtgcaccaggtggctcattcatttgcccgaataccatggctgttttcttaattacaccactgtcactcatttcgaagtataaatcgttaccttcacgagtacgttcacctacaccggcgaatacagaaataccaccgtgctcttgagcgatgttgttaattaattcttggattaatactgttttacctacaccggcaccaccgaacaatccgattttaccacctttaatataaggtgctagtaaatctactactttaatacctgtttctaaaatttgaacttctgttgaaagttcatcgaatgctggtgcttgacgatggataggatcgcggcgaacagaatcactaatttcttctttaaggtcaattgtttcacctagtacattaaatacacgacctaatgtttcgtcaccaacaggtacactaatttctttgcctgtatcttttacatccatgcctctttggacaccatcagttgaatccatcgcaattgtacgaacaacgtcgtcacctaattgcagcgcaacttctaatgttagttgtattgtaccttcttctttaggcacatcaataaccaaggcgttattaattttaggaacttcgttatgttcaaatcgaacatcaattacaggacccataacttgagttacacggccaattcccatgctattttcctcctttaaatattattcaagcgctgcggaaccaccaacaatttcagtaatttgttgcgtaatttctgcttgtctcgctctgttatattctaatgataagtcatcaataagttcagttgcattatcagtggcatttttcatcgcagtcatacgtgttgcatgctcacttgcttttgcgtctaatattgttccgtaaatcaaactctcaacatattgaggcaagattacacttaagatagattctttatctggctcaaattcataagaagacaaatgaccatgccccttactagaatcctcttgagataatggtaatacttgtctagatgtaggcttgttttcaagaacgctgacataatgactatagtatatatttaattcatcaatttcttcttcactgtataagtctatagcatggttagctagtgcttgaacagatttgaaagaaggttgatcaggtacgtctacttgagaatactcaatgtcataacctctattttttaggaaatcaacaccttgttgccctaaaactacaatactgtattcgctactatcttgatgtttcgcttcaatatcagtaatcaattttttaagcacgtttgcactatatgcacctgctaaacctttatcactcgtgataactaaatatccacttctagtaattttacgaggtcttagcattggatggtttgtattgctacttgcccctgcaactgcagtaattgcatcttgcattttatccatatatggtgtgaattgttttgtatttttttcagctctacgaagttttgaacttgataccatgttcatcgctttcgtaatctgcttcatttttttggttgattttattcgagtatctatttctttaagagaagccactatctcaccaccttatactaaacttgtttattattcagatttgctaaagctttttttgaattcgttaattgctgtgtcaaacttctcagcatctggtaagccaccagtttctctgatttcatttaacagttcagtagcatttgattctgcccagtggtttaactcatcttcaaaacgtgtgatatctacaactggaatatcatctaaatatccttttgttaatgcataaataatcaacacttggtgttcgactggtaatggtttgttttgatcttgttttaagacttcaacagtacgtttaccacgttctaatttacttgcagtaaattcatcaaggtctgaaccgaattgtgcaaatgattcaagttctctgtatgacgctaagtcaagacgtaacgtaccagcaactttcttcattgctttaatttgtgcagatccaccaacacgagatacagattgtccagcattaatcgctggtcttacacctgagaagaataaatcagattgtaagaagatttgtccatctgtaattgaaataacgtttgttggtacataagctgaaatatcaccagcttgtgtttcgataattggtaatgcagtaattgaaccgccacctaagtcatcgtttaattttgctgctctttctaataatctactatgtaagtagaatacgtcacctgggtatgcttcacgacctggaggtctacgtaataataatgataactcacgataagctgctgcttgtttagttaaatcatcataaacgattaaaacatgtttaccgttaaacatgaattcttcacccattgttacacctgaatatggtgcaatatataataatggagaaggttcagaagctgatgctgctacaacaatagtgtagtctaaagcgcctgcttgtcttaacttttcaacatttgctcttactgttgaatctttttgaccaatagcaacatagatacaaatcgtaccttgatctttttggttcaaaattgtgtcaattgcaattgttgttttacctgtttgacggtcaccgatgattaactcacgttgacctctaccaattggtactaaagcatcaattgctttgatacctgtttgtaatggctcatctactgatttacgatccattacaccagtagcttttttctctactggacgtgttttagttgtgttaatcggtccttgtccatcaataggttgtcctaatggattaacaactcttccgattagttcttcacctactggtacttccatgatacgaccagtacgtttaacttcgtcaccttcagtaatacctgtgtatggtcctaaaataaccacacccacgtttgactcttcaaggttttgggctaaaccaagtacgccgttatggaattctactagctcaccagccataacgtcatttaatccgtgaattaatgcaataccatcaccaatttgtaatacagtacctacatcagttacggacatttctgactcataattttcaatttgtgagcgaagtaatgcactgatttcttcagcttttatggccatctatgtcactcctctttataattaattaactcttctaaattttctttgtaattggacaagatcatttctaacactaccatctaatacagttgtgccgactttaactctaaatccaccaattaaatctggattaatttttgtatctacaataactttagataacttcgtttgttgagttactagtttgacaatcttatctaactcttcttgactcaattcatatgttgactcaattgttgcaaaatcttgattgtagtgtccgttatataagctttggaacgccttgaatacgtcagctattaatgagatatgtctattatctgctaacacgtacatcatatttttaatgtatggattaatgtcagtaaatacaccattaatcaactcacgacgttgttctgctgtttgagttggattactgtcaaccattttcaattgctcaattttatcttttactgcttcatttataactgttaattcttcattaatagtctctaaattatttgtatctaatgacacgtcaaataatgctttagcatacttgttagctacttttaccattatttatcgcctgcctcttttagatacttgtcaaccaatgctttttggtcttgttcagaaatttcttttctaagaactttagaagcaattaacactgatagttcagatacttgattattaatatctgcaatggcacgttctttttggctattgatttcactttgtgctgtttcaatcataccgtttgcacgtacgtttgcttcatgaataatttgttcttgctgttgacgtgcttgaaccttagcatcttctaaaatcttttgaacttcttcttgtgtttctttaagtttttgtttattttcttcttcaagtttctgtgcatttaacttagcttgttctgcgtcatcgatatctctgttaatatctctttcacgtttatccattacatctttcaatggaccccatgcgaactttttaagtaacgcaagtaacacgatgaaagttaggacctgtacaatcacagtaccccactcaacgcctccagctgcaccaagaacgaataagttagctgtttcagtcacgggttcatgacactcctttcattaaaataatcgctagtgttatatagaaaaaacgacgaggttaggacctactgaatttatgcgataggcatggtgcattcatatctcaactatttaataaagttcaaagatattactatatatgcatcatgaattatgtcctatgcgctttgtcccgacctcttttatctgttaattatccagcaaatgtcatgaatgcaattactacaccgatgataggtaatgcctcaactaaacctacaccaatgaacatgatacccattaattgaccacgtgcttctggttgacgtgctacaccttcaactgttcttgaaacgattaaaccgttaccgatacctgctcctaatgctgataaaccaattgcgattgctgctgcgattaaattcataatttaatttcctcctgtgattgtatataattattgaaatttttagtgttcatctgccactttatgtgacatataaaccatcgaaagcataataaagatatatgcttggattgttcctacaaatattgaaaatgcttgccaaacaattaatcctgggatactaataatccaaccccatgctggttcgttaaagaataagccagcaagtaatgttaatagtatctcacctgcaaatatgttaccgtacaaacgcagaccaagcgttaatgttgaagtgaactcttcgaaaacattaataattgccaatggccaaaacggctgtacataacctttaagatattgtttcgtaccacgcattttaattccataaaagtgagttaacagtattatcgttgtagacaacgttaaagtcactgttgcatcagctgtcggtgatttccaccacaatgtgtgatctttcgttactatagaaaacggaagacctaacatattagctataaaaatgtacagaatcagcgttactgctaagaagtggaattgaccaccttttttccaagccatgttaccttcaatgattcccctcacgaaatcaaaaatccattcaacgaaattttgtttgccagttggtctttttttcaaattacgcgtacaaatgatagcaagtagaaaaacaagaaacgccgtaacaagtatcatcaatatacttgataaattgaaaacgatatcaaaaccgaataaattccaactcacgagcggggatttgtgatccataatctcacctctttcttaatttatttgctcacctttagtaaaggacgtatgataactacaacatatgaaatcattaaaccaataattataccgatgatacttacatgcgctttattaaggtaccaaatcatacaggcaataattgcaactaagtatcgccacatatttccagttgaaatatgcatagtgtctggtcttttagctttagctaaatagcattcaaaaatacatgtgttgattgcagaaccagtaacaccaatgattaatcctaagataaatgcatggtgtgtataaaggtataatcctcccaatattattattagataaaaataatattgaatgaactgtttaaaaatgttgtagaaacgactcattttatatgcctccgtgtgactgatatcaatcatgaaaaccgttccactcatacaaactaaatgataatataggcgatttgtggtgtcaattctattcaaattgttgtaaaaaaataagcatagttagacacaatttagacacaattagacaaaaagtctattttcctcagaaatcgcttagtttttcagtgattaaattcaaataatacttaatatgattaactattctttctgaagcaaatccatcaccgtaaggattagatgcttcagacatttgatgatataatctctcatcatcgattaattcttttgcagcttgatacacattttgcttatttgttccaatgacttttaatgtgccagcttcaacaccttcaggacgttctgtaacgcttcgcaaaactaaaactggcttattaaatgatggcgcttcttcctgaattccacctgaatctgtcaaaataaaataagattttttagcaaaattatggaaatctactacgtccaaaggttcaatcaattcaattctgtcatgactacctaaaatcttttgagccacctctcgaactttcgggtttttatgcattggatataccagtgctaaatcagtatactcatctattaagcgtctaaccgctttaaatatattttccatgggtttcccgatattttctcgtcggtgtgctgtcataagaatgaattttttgtcatggtatttatccatgatgttagatttataattgtcatcaactgtatatttcatagcatcaatcgcagtattaccagtgacaacaacactttctgaatatttcccttcacttaacaaatgcgatgcagcatttttagtaggtgcaaaatgtaagtcagctaatacaccaactaattgtctattcacctcttccggaaaaggtgaatatttatcataacttctaagccctgcttcaacgtgtccaatcggcacttggttataaaatgccgctaaaccacctgcaaatgtcgtcatcgtatcaccatgtacaagtaccatgtctggtttttctaattgaatcacttgttctaattgagtgattgatttagaagttatctcagaaagtgtctgtcctgatttcataatattcaaatcgtattttggtttgatttcaaaggtacttaatactgaatcaagcatttctctatgctgtgctgtaacaacaacaattggctcgagcattttttcttgttccaaagctttaactaaaggagccatctttatggcttcgggtcttgttccaaatatggtcataatctttttcatcaaactacttatctccgattcttctatttagtaccaaacaatctatctccagcgtcgcctaaccctggtgtgatatatgctttatcatttagcttttcatcaagtgcagcaatataaatatctacatctggatgtgcttcatgcatcttttctacgccttctggtgctgcaattaaacacatgaagcgaatatttttagcgccacgtttcttcaatgaagtaatagcttcaattgctgatgcgcctgttgctaacataggatcaacaacaatgatttgtctttcagtaatatcttgaggtaacttagcaaaatactctacagcctttaatgtttcgggatctcgatacaaaccgatatgtccaactctggctgcaggcactaaacttaaaataccatcagtcatacctaaaccagctcttaaaattggaacgatagctaattttttaccagctaatcgtttagccgtcattttagttacaggcgtttcaatatcaacatcctgaagctctaagtctctagttacttcatatgccatcaacataccaacttcgtctacaagttctctaaattctttagtacctgtatttacatctctaatatagcttagtttgtgttgaattaatggatgatcgaaaacgtgtactttactcataaaaattactcctatctttgtgtatgtttattgatatagaggatattcagctgttaatttcgcaacgcgttctttagcttgttgtaatttttcttcatctttactatttttcaatgctaaactgatgatttttgcaacttcctcaaaagctttttcatcaaatccacgcgttgttgcagcaggtgtacctaaacgtataccactcgttacaaaaggtttttcttgatcgaacggaatggtatttttgttacatgtgataccaactgaatctaaagtctcttcagcttctttaccagtaagtcctatagacccttttacatcaacagctactaagtgattatctgtaccgccagaaacaattctaaatccttcattaattaatgcttctgcaagaacttttgcgtttttaaccacttgttgttgatacgttttgaaattattttctaacgcttctccaaaagcaactgcttttgctgcaataacatgctcaagaggtccaccttgaataccagggaaaattgttttatctatgtcttttttatattcttccttacataaaatcataccaccacgtggtccgcgtaatgttttgtgtgttgtagttgttacaaaatcagcatattctactggatttggatgtaaacctgccgctactaatcctgcaatatgtgccatgtctaccattaacttagcgtttacttcatctgcgatttctttaaactttttgaagtcaattgttcttgaatatgctgatgctcctgccacaataagcttaggcttatgctctaacgctaatttacgaacttcatcataattgattcgttctgtgtctttatctactccatattcaacgaaattgtagaatttaccactaaaattaacaggcgctccatgtgtcaagtgaccaccatgactcaaattcatacctaaaactgtgtcgcccatttctaatgcaactaagtaaacagccatgttcgcttgtgaacctgaatgtggttgaacattgacatgttcagctccaaacaatgctttagcacgatcaattgcgatgctttcagtaacatctacaaactcacagccaccataatatcggcgtcctggatagccttcagcatacttattagtcaacactgaaccttgtgcttccataaccgcttccgatacaaaattttccgatgcgattaactctatgttgctattttgtctctgaaattctctctcgattgcttctgcgataactttatcttgcttggtgatataagacataaaatctccccttctttcaaaaaaacttattggtatttagcacgttcgccaccaatctttttcggcctagatgtggcaatagttacaattgcctgtcctacttgctttactgaggtccttacaggtacacatacatgtttaatatgcatgcctattaacgtttgaccaatatcaattccacaaggaacagtaatatgttcgaccacgatcggatccttcatatgctgaaaagcgtatgttgccaaactccctccagcatgtacatctggaacgacggaaacttcttccattgttaatggattatactgagatttttctattgttatcgctctgttgatatgttcacatccttgaaaagcaaaagtaacgcctgtctctttactcacaacatctaatgcattaaaaatagtttctgcaacttccatcgaaccgacagtccctattttttcgccaatgacttccgatgttgaacatccaattaaacatatatctcctttattaaaaaaggacatatcttttaattcgtctaataacattgtcaaatctttcataaaagcccacccttcctaaaaataaaaaaggaatatagcaaagtgctacactcctctattataacttatttaactgttaacatatactaattatacagaattcctactagcaaataatatcttttaattttaaaattaaacttacaagttcttcataggtatgtacatacatttcttttgttccaccgtatggatctataacttctcctgcttcttttacatattcatgcaatgtgaaaacatgattttgcaaaccaaagtgtgcctctattaattctttgtgcgaatacgacatcgtcaaaataatatctgctttcaaatctgcttcagtaaattgttgcgataaggtcgtttcagctaaatgatgttcttcaactaagtcttcaacataattcgaaacaccttgattgttcacagcgaatatacctcttgattcaaattgatgatttggcataacctcttttgcaatactttccgctaatgggctacgacatgtgttacctgtacaaacgaataaaatcttcatagttcacatcctttaataatgtgattacttgcagcttttaacatgcgattcataattgcttctgtattatcattcagctcaaagccgtatatatacgccgctgaaatattttcattttcatcaagtgaatgtaacacatcataaagattatgacttgcttgtttaacatcattgtcatcctgacataattgaatgaattgcgcttcacttggtataaacgccaccttattactcggcacaataaaagctatagaagaccaatctttaccgtcatttccaattttgctctcaatatctgtaataattgtaagtggtgtattgggtgagtaatgcttatacttcatacctggtgcaattggctgttcagtatcattataatcagcatgggcgatactattcggaagtatttctgtaatcattgctgctgttatagaaccaggtcttgcaattttataaggaaaagatgtgcaatctaaaaccgtactttctaatccttcttcactttgttcagcttgaacaataccatcgatacggccattcaaatcttgatatacatgattgaaagttgttggtgaaggtctaccacttaaattagcacttggagcagctagaggttcatttatgatttgtaataattgtctacctacagaatggcttggcattctaacagcaactgatgataaacctccagaaacttttcgacatagatagcctggctttaacggcaatataaacgaaatagggcccggccagaatgcctgcattaacttttctacgcgtggatccaaagtatatgtaaaatcttttaattgacctttactgtgtatatgaacaataagcggattgtcagatggacggcctttagcttcatatattttagctacagcttcttcatctgtcgcatttgctgcaagtccataaactgtttcagttggtaaacctattaaaccaccgtttaaaacaatgtcttttatttcattaattttaggatattgctgtaaatcttcattatattctctaacatcccaaattttagtatccaacttaatcacgcctttcttatttatcataatataaagcaaaaagctatgcacttaactaatcatagcaaaggcataacttctaattaccatttaaatgagacgattcgatcgtggccatttatatctttaataatgtcgatttttttgtcaggaaatttatttaaaattattgatttaagtgcctcaccttgattgtaaccaatttcaaaaacaactgggctgcctttttccataacgtgaggtaaatcttcaatgattgattcataaatagcatatccatggttatctgcaaacaatgcctgatgtggttcgaatctcgtaaccgttggagacatcgtaaccatatctttttcatctatatatggtggattagatatcaagccgttcaacttgatatcttcattaattaagggctttaatgcatcccctgttaaaaattgtatttgtgattgatgcttctcagcattattacgagccatattcattgcttcaagtgaaatatcagtagcaataacatttaaatccggcttttcacatttcaaagtaattgcaagtacaccactacccgttccgatatctacgattgttgcatcatcttctaactgttgtaagaaatgcaacattacttcttcagtttcaggtcttggtatcaaacaatttgagtttacatcaaacgttctaccataaaatgaggcaaagccaactatatactgtataggctctcctaataacatacgttgtaatgctaagtcgaacttcataatcatcgctttcggcatatcatcatgcatgtggactacaaagtccgtacgcgtccattgaaatacatctaacattaaccattcagctcgtgtttgttcaaaccctttttgttgtgttaaatgaattgcttcatctaacttttctttataattcaccattattaagttctttcaatttatctgtctgctctgataaagtcagtgcatctataatttcttctaaatggccttccataatttgccctaatttttgaagcgttagacctatacgatggtctgttacacggctttgtggataattataagttcgaatacgttctgaacgatcaccagtaccgactgctgatttacgttgtgacgcatacttttgttgttcttcttgaactttcatatcgtataaacgtgcttttaacactttcattgctttttcacggttttgaatttgagacttctcagaagatgttgcaatgacaccagttggtaaatgggtaatacgtactgcagagtcagttgtgtttacgtgctgaccacctgcaccacttgaacgatacgtgtcgatttttaaatcttcatttctaatttcaatttctacatcttcaacttctggtaaaactgccactgtagctgttgaagtatgaatacgtccacctgattctgtttcaggcacacgttgaacgcggtgcgcaccattttcaaatttcaatttactatacgcgccattaccagaaactgagaaactaatttctttgtaaccaccatggtcactttcagacgcttctactatttcagttttgaatccttgtgattcagcatactttgaatacatacgcattaaatcaccagcaaaaatcgcagcctcatcaccacctgctgctgctcttatttctacaataacgtctttgtcatcattaggatctttaggaatcaataatattttaagctcttcttcaagatttggaagttcagctttaataccattactctcctcttttaacatttctacttcttctttatcatcagtctcacttaacatttcttcaatatcagctaattcttcttttttagctttatagttacgataaacatctacagttttttgtaaatcagcttgctctttagaatatttacgtaatttatctgaatcatttacaacatctgggtcacttaacagttcatttaactgttcgtatctttcttctacaatatctaattgatcaaacacttataattcctccttattattatcactaggtgctacgatatggtgcgcgcgacaacgtggctcataactttcattggcacctactaagataatcggatcatcgattttagctggtttaccatttattaatcgttgcgttctactagatgaagaaccacaaacagcacaaactgcttgaagtttcgttacttgttcactgacagccatcaatttaggcattggttcgaacggttcgcccctaaaatccatatctaatccagcaacaataacacggtgtccatctgctgatagtttttctactatacttacaatttcatcgtcaaaaaattgcacttcgtctattcctataacatcaacattagttaagtcgtgcgtcataatttcacttgctttagaaatattaatcgcttcaatggcattaccattatgagagaccactttttctttatgatatcgatcatcaatcgccggtttaaatacaacgactttttgtttagcgtatataccccttcttagacgtcttattagttcttcggatttaccgctaaacatactacctgtaatacattctatccaaccggaatggtaagtttcatacattgagagttccacctttttcaaaacataatcgctttattatatcatatttcaaatattcataaatgtctttttcataattatatcgatattgtacatgaacaattattttataaatttgtcttgcatatttatatacagctattctaatttgttgcttcttattcgtgcggtgtttctactcaatacaaactttaataaagggggaaatttatcattatgtattaacaacatggtattgagtcacttctttgaacacagtcataagtatatacccttactacgcttataaataaaaaagctgtctacaattccattataggatgcagacagcttaacgattactatattagttgtttgatttaagaccaaactttttgttgaaacgttccacacgtccatccgcagcagcgaatttttgacgtccagtgtagaatggatgtgaatcagatgaaatatctaaacgaataactgggtattcttttccatcttcccactccatcatttctgaagatgtttttgtagaaccgcttaagaatttgaagtttgtagtagtatctaaaaagattacttggtgatactcaggatgaattccttgtttcattattttcagctcctttgccctgaaccatctggaacagagttatttgtgagtttttacccaatactgtgtaattataaaggtaattaattcaaaacgcaagcccctatataatgtttattaaattataggtcgacccgttttagtactttcttctgcagacttttgtagctgcttgaagaaatcttcattattcttagaccttttaagtttgcgaataaatctttcagtaaagtcagttgagtcagtgaatagatttcttaattgccataatgtgtctaattcagatttacttatcaacaattcttctttacgcgttgaacttctgccaatttcaattgcagggaagatacgacgttcagacaatttacgatctaaatgtaactccatgttacctgttcctttaaattcttcgtaaatcatatcgtccatacgtgaacccgtatcaactaatgcagttgcaagtattgttaaacttccacccgcttcaatatttctcgctgcaccgaagaatgcttttggtttgtgtaaagatgcaggatctaaaccacctgataatgtacgaccacttggtggaataactaagttataagcgcgtgctaatctcgttatagaatccattaaaataatgacatcttccccaatttctactaaacgctttgcacgttcaagtaataattcagctactttaacatggtgttctggtggttcgtcaaacgttgaatgaacgacttcagcagcttctactgagcgttctaaatctgttacctcttcaggacgctcgccaactaacaaaataaatagctttgcatctggtttgttcgtactgattgcattcgctatttcttttaataacgatgttttacctgctttaggtggcgccactattaaaccacgttgacctaaaccaatcggtgttactaaatccatgatgcgcgttgaataattttgtgtttctgtctctaatttaatacgctcatctggataaagtggtgtcaaagcttggaaatgcggacgtttcttcacttcttctgcgttatggtcattgacaaagtcaacttgtaataagccataatatttttcgttatctttaggttttctaactttcccagttactttatccccacgtttaatttcaaaacgacgaatttggctagcagatatataaatatctttttcccctttagaatagttcactgttcttaaaaaaccataaccatctggttgtatatcatctaagataccttccatataatagttaccatctttttccatttgtgcttccataatagctagaacaagttcttttttatttaatttactatagttcgtcaacttaagagttttagctttttgagtgagttccttggtagtatagttcttgtacaattcgtggaatgattcatactgaggagatgtacgttctctttcaggcatatagtttacacccatttcattattttttagttagtaagtaatagataggcatgacaatgcataaataactgtgctagcacaatcccattatgctaatccccaaccttttaaatacatgaataactatagcaaatttttattttaattacaaaatctatttataaaaattgcaaaattaaaacagtacacaaaacttaattagtcatgtgcactgttttattgcgatttttaattcaaaaatcaaatttatttaaaatatccagctatagatttcacttctaagaactcttcaataccataatcgccccattcacgacctaaaccagattgtttatagccaccaaatggtaaatctggctttctacctgcttcgtttatttctactgtacctgcttcaatagaacgagctactttatgcaatgtttctttgtccttaccaataacatatcctgccaaaccatattttgtatcatttgcaatttgaatcgcttcatctaaatcgttataagtgataactgacattactggcccaaaaatttcttcttgtgctatcgtcatttgattatccacattaataaaaattgtcggacgtgcaaagtatcctttttcaagtccttctggtttaccaggaccaccataaaataattcagcaccttcttcaatacctttattaatataattttgtacttgatcaaattgttttttactaatgatagggcctacttgtgtaccatcttctcttggattaccgacacgcacttggctaaattgttcttttaattcagctaagaatgcatctttaatttttttaggcactaaaactcgtgtaccagctgtacatacttgaccagtattattaacaactttgcctgttgttgctttagccgcttctttaatatctacgtcatctaggacgatgtatggtgatttgccaccaagctctaatgatacctttttaaaatctttagcagctttttccataattttagaaccagtagggcctgatcctgtaaatgacatcatgcgtactttaggatgctcagataaaggattcccaacgccagcaccatcaccattaacaaggttaaatacacctttaggaacaccgactttatcaaaaatctcagctaaaataacagctgcaaatggtgtttcttcagatggtttaagtacaactggactaccagccgcaaatgctgctgctaattttaatgatgtttggtttgtagggaagttccacggtgtaattaagccagatacaccgattgcttctttaacaactaaatcatctccgcggcgttcttcaaattcgtagttatctaatgcgtctctcgctgcaacaaaatggtttagtcccatttgataatggacacgctcagataatgataaaggagcacctaattcatccgtaatagcttgtacaatatcgtcttttctgttttcatattcttttacaattttatctaataacgcttgtctttctttcacagatgtatgacggaactctaaataaacattgtctgccgcctcgacagctttatcaacatcagctttattgcctttagcaactttcccgattacttcttcggttgctggatttataacttctatcgtttcattactattactttctacccattcgccattaatgtattgctttgtgtagtctctcattattctttcactcctcaagaatgatttatatattatttatccgtaatgcatacgatataaacattacattccattatgatacgctcccttttaatatgttcaaaataaaatgctttaaaattttgctgcatctatttttttatatttttaaataaaaataactattcccacatcatcgcaaataatgcgaagacttagaaatagttataatcaatgctatgtttaaacgtcatgtaattatttagcagtacgttgatctgttaaatcgacatatgattgcgcccatgcttcaattggatgtaaagcctctgctaacgctttacctttttcagttagcacataaataatttgtactggactcgtagaaatgatttgcttctcaactaactcccattgtgcaagctctgacaacttaagacttaaagcacgtggtgttattgttttcaaatctcttttcatatcggaaaagtgtgctgaacagtcattacatcttgagagataattaatgattaatccattccaacttctaccaagtattttaaaagtttcttcgagatacggacatacttccatcatcttcacctctcatcaataaatttagaatgtaaacgaacacccttttttaatcagtataattattataccacaaaacaagataaatctatacagtttccgtccaaatatctgcacctaaagcttttaagtgttctacaatatctgtataacctctataaatatgttttacattgtaaattgtagttacaccctcagcaattaaaccagcaataattaaacaagctcctgctcttaaatcgctagcataaacttcagcaccatgtaatgttgatggctttatcgttgctgtgccttcgtcaacttcaatatttgcacccatgcgctttaattcttcaacatgtttaaaacgctccggataaatcgtatcagttacaaatgaaggaccatttgccataaataataatggtgtaataggctgttgcaaatcagtagcaaaacctggatatactagtgttttaatatcaacaaattgatatggcgcattattattgatgcgaattctttcgtctcttacatcaacattcacacctaattcactaaatttagcagttaatgtttctacatgtttcggaacaatattatttaatataacattttctccacatgctgcagcgatacacatatatgtgcctgcttcaattctatcaggtataacttgatactcagaaccatgtaattctttgacgccattgattttaattgttgatgtacccgctcccttaatattagctcccatacttgttaagaagttagcaacatcaactacttccggttctttagcagcattttcaattacagtttgtcctgttgcataaactgcagctagcataatgttaattgttgcacctacgctaaccatatctagaaaaatatgtgcaccttttaactctttagcttcgattttcattgatgtcgtacttgattcatcaatttcagcacctaaagctttaaatcctttaatatgttgatcaattggacgtggcccaagtggacatcctcccggtaaaccaatcacacattttttaaatctacctaacatggcacccatcatatagtatgaagcacgtaatgattcaactttattatttggtaatgcagcattttgtatttcagttgtatcaacttctaattccataccatttagtgatgccttaatatttaaatcttctaataaactcactaaagttttaacatcagagatttgcggtaacccttctaatttcacatgtccttgagctaataatgttgcaggaatgatagctacagcactgtttttcgcgccactgatattaacttccccatttagtgtgcgtccacctcttatttttattacctcttgagccatatcatttatctcctttgtccattactttttaattttttgcattattagcattataaattaattttactttatttgtaaaatagtttattttaatcgttaaaatcttgtctttctattttcgattgattaataacaaatcattcacctttactaatatatgctgttcttccccacttgaccatggtctaaagtctgattattcaactaaatattgacgttgttttgacaattatttagttttaattctacggttttcacgtaaacttttttcataaattgctcattttccttataattatatcacaatcaattttgatatattttaccatttttacgctttcattttaaaatcaaactgttttatttattacttatacaacataaaaaagaagcaaacaccattttgtctgcttcttttaaaattaatatccctacgttattaataacttaaagactaaatattaattatttagcgcggtttgaagtaccgaactctttaattttacctttaactgtttctttgatagcttcacgtgcaggtcctaagtatttacgaggatcgtaaacttctttgtcgttatttaaaacgtcacgaactgcttttgctgaagcgatttggttttcagtgtttacgttaattttagctgtaccaaatggaattgctttttggatatctttagttgggataccagtaccaccgtgtaatactaatggtaaaccagttgataaaccgatttcttccatttctttgaatcctaattttggttcacctttgtatggaccatgaactgaacctaatgctggcgctaatgcatcgataccagttttttcaactagttcttgacattctttaggatcagcataaatgatgccgtctgctacaacatcatcttcttgtccaccaacagtacctaattcagcttctacagaaacacctttttcatgagcgtattcaacaacttttttagttgttgctacgttttcttcgaatgggctgtgtgaagcatcgatcattactgatgtgaaaccagcatcgatagcttctttacatttttcaaagcttgaaccatggtctaaatggattgctacaggaatagtgatgtttaagtcatgcattaacccttcaaccattttaacaattgtgtagaaaccgctcatgtaacgagcagcaccttcagaaacacctaaaattacaggtgcgttttcttcttgtgacgcttctaaaattgcttgagtgaattctaggttattaatattgtattgacctaccgcataaccattttcttttgcatcaattaacatttctttcattgaaactaaaggcatgaaagttcctccttgagtgcttacgcacgtatttttcaaagtaattatatcaaaaaaatagcgtcaatgcattgaaatactgcagattaaatgtgtattttttgaaaaatgcgatagttatactaaatgcaaacgtatacatttttatacaatttaagccgttgcataatatgtagtcattaattacaatattttataagtagattggaggataaagatgtcaaaaatcttaaacacacaactaataggtatctttaataggctagaaaaacaatctttagaaattcaaatggccgcccaatgtttaattcaagcaattggtggcgaaggttatgtttatgtaaaaggttatgatgatttacagtttttcgaaagtttcattctacatagtgatgagcgtttaaaatctagccgaaaacttgacgctattaaagactttaaagaaattgactcaactgatcgtgtattattattcgcaccattttataatgatcaagttgcattagatattcaaaaacttatcgacttagatatcgatgtggtcttaataagcaacaaacctaaaacagatgatttccctgatcatctcgtacattttatcgatttatctacaccaagacctatagtctacactgaagattacgataagattgtccaaccacatgcgatggcattgaattatgtatactatgacatttatacacaaatgattgaaatgacaagagacttagaattataaaagtcactattgttatttcataccttgtcactaacataatattaaaattatatgaaaaaccggtactttcaatgtttaacaatgaaagtaccggttttattagcaaatttatttattttgttgatattttaacgaagcttcaataaatgatttaaaaatcgggtgcggacgatttggtctagataagaattctgggtggaattgacaagcaataaagaaatcatttgtcggaatctctaccatttctactaaacgtccatctggacttgtaccagaaattaccataccatttgcttctaattgttctctatagtcattattaaattcataacgatgacgatgtctttcttcaatttccgctttaccataaacatcttgtgccaatgtgccttctttaattgaacatggatataagcctaagcgtaatgtaccacctaaatcttcgatatctttttgttctggtaataaatctataattgggtatggtgttgctgggtctaattcagctgaatgtgcgccttcaaggcctaatacgtttcttgaaaattcaactgttgcaagttgcattcctaaacaaataccaaagaatggtacattgttttctctagcatacttaattgcactaattttaccttcacttgcacggaaaccaaatccacctggtactaaaataccgtcgacatctgcaaggtattcggctgcattttcatctgttacttcacttgaatcaatccatctaatgtcaatatctttggcaaaaggatatccagcatgtttcaatgattcaacaactgataaatatgcatcttgtaagctaacatatttacctactaaaccaattgtaattttaccatctaaattattaacgatatctaacaactgtttccattcatcaagctgtgtttcatatttcgcgtttaattgtaaacgtttaataacgatatcatccatattttgttggcttaattgtaatggaatttcgtataaagagtctgcatcacgacattcaataacactttctttattaatgtcacagaataatgcaattttatcttttaaatcttgtgtcatttcatattcagttcttacaacgattaagtctggttgaatacctaagcctcgtaattctttaacactatgttgtgttggcttcgttttcatttctccagcagctttaatataaggcagtaatgtacagtgaacatacataacattttctctacctaaatcgctacgaatttgacgaatcgcttcaataaacggtaatgactcaatatcacctgttgtaccgccaatttcagtgataacaacgtctgcattcgtactttcccctgcaagtaataaacgttctttaatttcatttgtaatatgcggaataacttgaactgttccacctaagtaatcaccacgacgttcttttttcaatacgtgtgaatacactttaccggctgtcacatttgaaaacttgtttaaattaatatcgataaatctttcgtaatgtcctaagtctaggtcagtttctgcaccatcatccgttacgaatacttcaccatgttgataaggactcattgtacctgggtcaacatttaagtatggatcgaatttttgaattgttacatttagacctctatcttttaataatctacctagagaagatgctgtaatacccttccctaatgatgaaactacgccacctgttacaaaaataaattttgtcatgtcttgacctcctaattattaaagggaatgcttcctcatcaattgtaaaaattacgtaaaacataacattaaagcaagctcattcaagttgtttatttgtcgaattcgacaaaattaaattctgtttacttaccgtttccatactgctatgtcactatgtatatcatttacaactttgatttttgcgttatcatttcttgatttactcaattaaataaaaaaacgctccctctcacaaattctgtaaggggagcgtataaattttatacacgtgtcctatttaaaggagcccgaataaaattttatcatctttcaactaaaagtcaaacaaaaaattaatcgttgaagtcttcttcgtcttcaaacacttcttcgtcttcgtctagttcatcttcatcttcttcaatgactatatccgaatgattgatttcttcttcaacctgctcatcttctggatcatttagttcttcttgatcatctgtttgagctggaatatcatcgtcgtcatccatttcatcttcgcccaataattttaagttttgatcttcttcatcatctgcatccagaatatcgaatttttgaatagttggtgcgattttctcttcaatatcatctaccgaataccaatcacgtaatccccataaattttctccaacatttaaaaaacgaccatctgtgtttaaatccgtgtaaaattgtacaacacgattttcaatttcttcgtactcataatcacctaacgctctaaattcatcgatgatatcatataagttcattgtttcgcctttatcattcaataatgtataagccatatcaataaatgatttttcatcaaccatttgttttgtataatcttgaattttcattgcccaatacttcctttcgaaggatataatctaaatttatacgtctgaattcatttatatatagtaacaaaactaaattataaatgacaatatcatatttcgcaatcactgttagtaatttaaatatttttcaaaaacgacataatcatcagtttgttcgatttcaacgaaattactatttagacataatggtttaaaatcattattctctccaaacagaatcatcgtaatcacattaaggttgtcatagttttttcttaagtaagttggcaattgtcgcagcgcacttgaaccaataccattaaagcgatatgatttatccacttcaatagcagcaatgttcatgcgttcaccaatctgctccaatgcgataaagccaaccttttggccatcaatcattaaattaatgatatgtacattggtcacttctgaacgactttcttcttcaagctttaatgacgaaacatgttttgaatctaagtccaagtaatatagtcgttctttgccaattggtccttcttctttagtcgctgtatgcatgaatccagcacgttcgtaaaggttccaagcattgtcattttccgcatctactactagatatagatgattaaaatcaggaaatacaccttgaacatattgcggcaatgacatcattattttcgtgccatatccaaaaccttgatatttttcattaatcgataatgaacgaatataaacgacattttcaggtgtatcataaccttcatgctgatagtaacgatgtaatacaaaaaagcccaccacttcatttttatcgtttattgctacgttagcaatcctatcagcatcattaattgcatcatcaataacttctttaggtaaagatgaatatatttgttgtctttcattcaagtcaaaatcattaattgctgaacgatattgttcatcaaatgcttttaaagtgataccttcaaaacaaagttctttagccatatatttaacccctatctttttatatatgaagcatgaatccccatattattttacctattatttcactacgataccattatttgctctaagttaaataaattacttatttatattttttgaattttaaaattaatgtgctactcctcattacttatcattttaatcagagacttacaaatacactgcgtacgaactacttttaatattgcgtcactaactaacaatcctatacaacttcaaaattcctagaaaataatatatataacttaacgtctacgtttgtaatacattaattgcgatacgcttacaatgttgaaatacaatggcatcaaatttgttaataattactattattacttgttttttagtcattttactatactattatttaaggatagacattaataatgaggtgggaatcttatgaaagttggcattgacgctggcggtacactaattaaaatcgttcaagagcaagataaccaacgtacttttaaaactgaattaactaaaaatattgatcaagttgtggaatggttaaaccaacagcaaattgaaaaattatgcttaactggaggtaatgcaggtgtcattgctgaaaacatcaacattcctgcacaaatttttgtagagtttgatgctgcatctcaaggactaggtattttgttaaaagagcaaggccatgacttagcagattatatttttgcaaatgttggtaccggtacgtcactacattatttcgacggccaatcacaacgtcgtgtaggcggtatcggtacaggtggaggcatgattcaaggactcggttatttactaagtcaaatcactgattataaacagttaactgacatggcacaacacggtgatcgtaacactatcgatttaaaggttagacatatttataaagataccgaaccacccattcccggtgatttaacagcagctaattttggtcatgtactacatcatttagatgctgattttacacctagcaataaattagcagccgttattggtgtcgttggcgaagttgttacgacaatggccattactgttgcacgtgaatttaaaactgaaaatatcgtttatatcggttcttcatttcataataacgctttattacgcaaagttgtggaagattatactgtgttacgcggttgcaaaccgtactatgttgaaaacggcgcattttcaggtgctattggtgcattatatttagaaaaatagaaaaagaccatttatatgcgcgttgttttaaataaacgctatataaatggccttttattttatggtctaagtgttttgaatacgtattgttccatttattatcacttaattacttacaactcaattcaattaaaatgtaagttcattagacaatttttgcgctgaaacaattgtaccaaccacgccagtttttaaatctatcgcaacggctttatgatcatctctaagttcatctagccattctccgaaaacagaaccttcaatcgtaattaaatcacactcttcaaaatcttcatctcgaacttttaacgctctgtttttaatactccatacaggcataatatgcggctttttttcgtcgctatcattttcactaatgagaataaactgcttactaccttttttagttaagccgtatacttcatcatatttcgctacatcttggacaaattctttgattctaattttatctaattccgtcatcacttcttgtgtaacagctacaacgtttagtagatgcccttcttcttccattgtttgattcataataatatggtcttgttcatcaaacaattcatctaattcataagtagcaaaacgatcaacgtccatttttacaactttatcaaatggaatatcacgacttgttaaaaatgatacggccacactttcttctgtccaaacgcctacatacgcttcacttttataatttaggcgtactagttttttatttttagaggcgaaataaatacattcatttattaatatatctctaaagaatggatatgctttataagacatgcttgaccctcactttttaaaatatgtcatacataaaatagtaaatgactccaacaagttagtcaattagacatattatgaattcaatttaatgtcatgtttttcattttaaaaattcaatagcattaaattttacgtatacacaaattcggtctataacacgaaacatatctagttactaaaaatttcaaaacgataacctttagtatacctttatcaacaaaatggcaactcttataacatagtgaaataaaagtcgccatttaatattagtattacaaagtattgccatatcataaatttaattactgttgactagaatcgaaaaaagcttgttacaaacgcatattcagtcaactactggcaacacaacattgtagcgccttatgttccgaactctaatagtgttcaagttcagctaaaaatgcgcgttcattctccagtactgtttcttttgaatcaccatgccaaatacagccaaaccttgatttaactttatcttcaccgtaccaatcaccatcataataagataacgggtataaactaccttctttgacatatttcaaaatcgtattgaagaaatgtgtgttatcaccttttgaatgataactataaaacttttgatatcctgaattcaactcgttagcaagtaataacatgctcgttgaaccattttgtctaaagtttaaatcaatcgcataaacgttatcatcctcatcgacgagtaggtcaaaaccagctacaccaaagaatccttgattcacaccgttttccataatttgtctacctgcttctataacgtgctctggtacattagtagtattttcatttccgttataaaatccgtacttatccgttaattgcgttgccgcaccaagatattgaatgcctagcgattccgagtatgcaaactgaacgcaataattcgctttttcttcaatcttctgttcgataataagcgaattcgtttcagcagttgcctctttaatacgcgttatcgctttttgtaaatctgcatcatgataacaaatcataacgccatagccacctgctgtcggaagatcatctcccggcttaattactaacgggaattcccaattcttaatctcgttttcgaattgctcaatttttacaacttttctttttggtaaaaacttcccatttgtccattcaggtattcttgctttattatttaaagcaacaaataacgttttatctaatgcataatattgctgattcaagattgtttcatcatgaatatattgaaaataaatctttttattttccttatgtgccaattgtttgatcaagttttcgtaagattgctgattgttaaatgtataaattgagttcggtacttccttaccaataacttgaaatagctgatgcaatttgtctgtcgcactagcttcgtgaacaataacaggtaattgatttgctattaataactccctaccagttaaaaaattagattgatgttcgtccggtttcaaccatggattcgatatatacgaaggtcttgacgtatagacaacatctttgtcatataaatcacttaacgttaagttcggctcattaccattatttgtcattacttcccattccctttcaaatgcgcatgctcttcaataatgtcttgataaacgtcttgatttgtaattaactctaaccccatcaacgccattattttagcgcctttaattaatgcttcatcaccatgtacactcgcagccgcttctctaaatctatgcgtatgtcctactaaattacgtgatcctattttaatatgaggatgtattgttggcacaacatgacttacgttccctgtatccgtagagccataaccaaaatcatcatcaataactgcttcaccaacttcttcagcatatttagcaaataaatcatctaatttcggcgttttaatgaattcattcacaccgttttgaattcgaccaaattcataatcacaaccagtctgtatcgcagctccacgtgcgatttgatttactttttctgttaatatatccaattctttacgcgtcattgctctagtataaaaacgagcatgtgtatagtctggaataatattagctgctttcccgccatctaaaatcacaccatgcacacgttgatcttttttaatatgttgtcgtagttgtgctacaccattaaaataactaatcatagcgtctaatgcatttaacgcttcatctgcattttcagaggcatgagcactttttccgtaaaatttaacatctaaaacatccactgccaaagtatcaatcgttttataagtttcatttcccggatgaatcattaaggcaatgtctatttgatcaatcacaccagccttgacataagaagctttagcgctaccattttccccaccttcttcagctggacatccaagaacgactactttaccaccaatttggtcaatcacttgcttcaaaccaattgcaccaagcacacttgcagttccaatgatattatgaccacaagcatgacccaaccctggcaaagcatcgtattctgctaaaaaacctatagctggcccgtcaagacctgaatcatatgtcgctataaacccagttgcatgcccagcaatctcggtttcaatttcaaaatcatgctctttcaaacgatctattaaagttcgagacgcaaatatttcttcattaccaagttcaggacgttcatgaattctatgactgatttcgatataactatatttatttgtttctatataatcgagaatttgttgtttttcactcattttttactatctcccttttaccctacactcattttaatcatccacaatattttgttctttcaaaatgaattattacttattctatcggttttatctcatgatgtcatctagtttttctttatttacaaaattttctaataactaaaagcctttcataaatttataaaacagtttcaaattgtaaaacataagccctattgttacaatttaagtattgttagaaacacaacttacaacaaacttaagttttataatgcaacaaatcataagcgttttatagttttgagtagttaataggaggaaattcaaaatgacaaaaatgaatgttgaaagtttcaatttagatcatactaaagtggttgccccatttattagattagcgggaacgatggaaggattaaacggagatgtcattcacaaatacgacattcgtttcaaacaaccaaacaaagaacatatggatatgcccggactacattcattagaacatttaatggctgaaaatattagaaatcatagtgacaaagttgttgatttaagtcctatgggttgccaaactggtttctatgtatcatttattaatcatgataattatgatgatgtattaaatattgttgaagcaactttaaatgatgtgctaaatgctactgaagtgcctgcttgtaatgaagtacaatgtggctgggcagcaagtcattcattagaaggtgctaaaactatcgctcaagcatttctagacaaacgaaacgaatggcatgatgttttcggtacaggaaaataaatcttagtcaatcaagttaatcagaaaagcagtcgaacaatgatgttacaatcgccattgtccaactgctttttattatgcttcaaagtcaaaaaatcgaacaaatgaaaaagtaaaatctttaacatttgtccgatttatttgagaaccactataatttcttaattagtcccattaacacgaactgcataggtaaccttaaatatagttgccatgttggcaattgtttatctcctaaaggtaactttttaactgccatatagatattagctgggaatacagctagcaagaatagattgattgtatttttcaagcattgagatggtcttttaattaaaagtgcaagtccaaataatatctcaaagattcctgtaacaagaaccgctgtttttcgaagtgggaaacatttcggtatgatatttctaaattgtcgttctcgtgtaaaatgcaatacacctattacactaaaacctattcctaataaatatcttagtatgttcaatcagcttcaactcctattctataatgattttatgaattaatgtaggcgatacaacatgatcagcaattgttatgcttgaatctaattttttaacaacatcgtctacatcttggcgattactgtgaatcgttaataatgattctccttcttctactttatcaccaatttttttatttaaaacaataccaaccgctaaatcaatatcatcctcttttgttaaacgtcccgctcctaacatcatcgaagcgacacctatatcgttagagactaattcagtcacataacctgattttttagctttatattcaatttgatattgagcttgtggcaaacgctctggatggtcaataacagtttcgtcgccaccttggtttttaataaatgttttgaatttttctaatgctgcacctgaattaattgcctcaattagcaacgctctcgcttcttcaagcgtttcagctttgtttgcaagtacaaccatttgagaacctaatgttaatacaagttctgttaaatctttcggaccttgtcctttcaacgtatcaattgcttcttgtaactcaagcgcattgccaatcgcacgtccaagtggctgattcatatcagaaataatcgccatcgtattacgtcccacattattaccaatacgtaccattgcgtgcgctaatgcttcagcatcttctaatgttttcataaatgcaccgctaccagtttttacatctaatacaattgcatctgcaccagcagcaatctttttactcataattgaagaggcaattaatggtattgaattgacagtaccagtaacatcccttaaggcatataattttttgtctgcaggagttaaatttcctgattgtcctacaactgccactttattttcattaaccaatttcacaaatgttgcttcatctatttcaacatgaaaaccatcaattgcttctaatttatcaatcgtaccacctgtatgacctaatccacgcccactcatttttgcaacaggaacatctacagctgctactaatggtgctaaaaccaatgtagttgtatctcctacaccacctgttgagtgcttatctactttgacacctttaatatcactcaaatctatcatatcaccagaattaaccatagccatcgttaatgctgcacgctcatcatcattcatatcttggaaataaatcgccattgctaaacttgatgcttggtaatcaggaatatcccctttaacatagccgtcaataaagaaattaatttcttccgttgttagtgtatgaccgtcacgctttttctcaataatgtctatcattctcatttttatcatccttttcttaaaaagcttaggacaaagcatctgcgctttctctagtccatttttaaaagcacaagcgaaaattattatagcaagctatcgatttcatttttaatatcacaatttcaatgcgatgttattattcttaaatagattggttataacgttaaagtccctattaaattaacttagaatcatcatggcatttatgatgtcttaaagctgatatcgacatacttatatatggttacgatgtcccatgcttacatatttttttataaaattagtaatctgaatctgcttctaaaccttgcataatttgaacgcctgcgctcgcaccaatacgtgtcgcacctgcttcaaccattttattgaaatcttctaaattacgtacgccacctgatgcttttacttctacatcagcacctactgtatctttcattaatttaacgtcttctgcagtcgcaccgccacctgcaaaacctgttgaagttttaacgaagtccgcaccagccgcttttgttaattcactcgcttttacgatttcgtcatggtccaacaataccgtctcaataatcacttttactgtgtgacctttcgcagctttaaccactgcttcaatgtcttgttgtacatcatcaaaacgtccatcttttaatgcgccgatgttgatgaccatgtcaatttcatctgcaccattttgaatcgcatcttctgtttcaaatgctttcgtcgcagttgtcgatgcacctaatgggaatcctattaccgtacaaactaacacctctgaatcagctagtcgttctgctgcatatttaacatgcgttggattcacacatacagatttaaaatggtatgctttcgcttcatcgatgatttgatcgatttgcgtacgtgttgactcaggcttcaataaagtgtgatcaatcaattttgcactatgcattttctatctcctcctttatggttgattataaaaatacggttgtaaattagttgattgagcgtcaggttcatttaaatatcaggttagatgttcgctttttatgtaaccgcatacatatactattacattaattcatttcccataaacaaacaatacaattgaacgtgatatcttcattatgaacgatgacttgacaacaagctaatcaggattatatttttataattctttaattctatagtacaaaaattcgcaaaaaagggaaacaaatgttatcttaaaattattaatgaatattaaggagaagataacaaatgacaaaaggtacaccacatattcaaccaaatggagtaaaaattgctaaaacagtattaatgcctggcgatccgctacgcgcaaaatatattgctgataattttttagaaaatgttgaacaatttaacgatgtacgtaacatgtttggttacactggtacatataaaggtaaagaagtttctgtaatgggttctggtatgggtattccaagtattggtatttactcatatgagttatacaacttctttgatgtagatacaatcattcgtatcggttcttgtggcgcattacaagaaaatgttaacttatacgatgttattattgcacaagctgcatcaactaattcaaattatgtagatcaatacaatattccaggtcatttcgcgcctatcgctgacttcgagttagtaactaaagctaaaaatgtcgctgaccaaatcggtgctactacacacgtaggtaacgtattatcttctgatacattttacaatgccgatccaacattcaatgatgcttggaaaaaaatgggtattttaggtatcgaaatggaatcagctggtttatatttaaatgcgattcatgctggtaaaaaagcacttggtattttcacagtaagtgatcatattttacgtgacgaagctactacacctgaagaacgtcaaaattcatttacacaaatgatggaaatcgctttagaaatcgcagagtaacttatttaaattgactttaattgctctttaacaatgcgattaaactcaaaaagccaacacattctgggcgtatccccatttatgtgttggcttttatttatattattacttatctgtagattagcttaagtaagatttaaacatccaattatgtttatctactgatgtttgcatacctataaacatatcttctgatacatcatcgccagcattaccagcaatttcgattgcgttttctaattgttttgagatatttgtgaagtcttgtgataattcttcaaccatttgttctgcagagtaacctttcgcagcttctttaacaattgattgctctaagcattcagttaatgtacctacagggtttcctcctaccgctaaaattctttcagctaattcgtctacatattggcttgcttcattatataattcttcaaatttaacgtgtaatgagaagaagttaggtcctttcacataccagtggaaattatgtagctttgtgtaagctactgtccagtttgctacttgttgattcaattcttttacaacatcttgttgattactcatatttaatacactccttaaaattgtctacgtcttgcttgtttatattaattattatattataatgattctaatctgtaaagtgtttttactctcttttttataattattctaatctaatcgtaaagtgttccgctatttaaatgcctaaattttaattcatcatctaatatatccattatcaattagcaagtatgttttatcaatcagtaagttttactttcgcattatcatctaaaaagaacgatttttcataatcatttggttggtgccatgttgttttccacattctatttctattattagcaaacattcgataaccgaaattacggactggtttaggtacaagccataaacctacgcccaataatttagttcgattaggtagtgctgtgattagtttaataatcgcctgcgattcaaaatatatacaatcacctttctgtaaaatcacactatttttatttgccgcttctggatgttgtttaaaaaattgttggccaacttcaccttttaacgtggcaaattgataatttcttggtaggtcatgttgaattaaccaaatgacatagttataacaatatatacagtttccatcataatatacgattggcataatttattcgctcctttaatagtacttatagtcatttttcctaatttaaaaacatttaaacaaggttgtcacttgataagtcctcgcgacacgaaattgccataaaatttatttttcagttttatatttattgtataatgtattttttatttactttaaatttctcaatctacagtgtaatcttatttcttattattaacttagcgtttggtcattcgtcttattcaacataccactggaaaactcatataaagttttaattctgtaacataaattcttttatattcatatactgtctttattatttattaaaataaaaacgagtaatctatcataagctcttaattagctcttatggttgattacccgtcattttttctttatgcggttattcaaatatgcaattatgcaatttttaatcctatccttacttcttttcaaaaactaccatatatcattagtcatgtttgactttgactatacgtgtgtattttaaaaactgctctgaatatttctccttaatttcctctaaactgtcatatgtaatacctacaatatgccaattaggattgaaataatagaaagaatctttttgtcgtgaccatttaatcatattaccgtctttattataacgtggtaatgttacttcatagccttctaacacattaatatacgtttggaaaatgtctgtatctatacgattaaaattatcaataactaaataacttttatcctttttaggcattaattgagtaataaacccttcacgatagtataatgcccctgtttcatttggtaaatacttgccataaagcatatcttctgaaaaatcaggatgacctgttgttataacaggatttgcattcgctttttgcaataagtcattagccgcttttaagccttcttcttttcgatctacaacaagtaaaataaatggctttaacgcttcttctttttcactttcaagcatatctggtttttgaaccatttcaaatggagatttcaatccattattatcgctcatttcaataattgcatcatactgtgcttgtgacatacttgcaatagcctgttttgcattttcttgaaggaaatataagtttttcaatttaggatgcttatttaatgtacttaatgtaatcggtgtaatgtctttctcataagacacttcaatcactgtactatttgttctaccaggaattggtggtttttcatgaatatgctttgatacttctccaattccaacgacagattgatttttcgttcgattataaaaaataatattgtcgccttcttctaactgagtataaaaatgataaccattacgtttaataccgttgtacgtgtgcgtataaatcgtatattggtttccaggttcaaattcttcagtttcagctaaaaagaaataacgcggtatcttaatttcgcctttaccaagaccacttattaaatcaaactcttctgcagtgatttgattgaacaatgtctctttcatattactcatacgaaattccaaagcttcactacgctttaaataatctgctgttaatggtttcaattgttcattaaaacgaaactgtacacgtattttattttgtgcacctgtttcaacactaataatttcaccacatccaagtagtccagtatccgtctgaacttgataaaagatgacttgatctcctactttagcctttttaaacgctctaaatccttgagatgggttaaaatgtgcgcctgattcaaataaagctgtttgtcctactaacggttcattatgattccaacggttatatccacaattcaaccaaaaataattcgtttctgctgtcatcttaatactccttaacctgaataaattttagaaacactatgaattacattcttttagtgtttcttatgcagttggacgcgtatgcgaacaactgtataccctttgttcactgcgattttaatcgcatttcctataacattgtagcgcccaggacattaatttacgtcccagacccttatcgttttcacttctaagtaagtcgaactattttgctttacaacaagtgcgactctaaatacagttggacacacatacgagcaactgtataccttttaatcagttttctatattttatttattatatctgtcttaatgataaaaattgttacaaacagtttaacatatttagctacctattttgcatataaaaaacatgcttgcatacactatgcaataaaaattacaaatttatatatgataccactaagcttgcttatctctatagcgccattgatacacatttttaaatatctatactgccgttagaattttatcatgtcttaattttcattaaatattaattacttcattttatataaaccaacaaaaaccccctcactactatgcaagtgagaggttatgttgatgtgctttattttcatcaatgtcattaacacgatcatatttcttctgttaatgcactgtactttattcaaacgcgctatcgacaattaatttgaagctacaaaggtaccgcataatggcagcacattaattaacaatgcgctaaactttaatgaggcgctgatttgcttgtctttaaaagtcaacatagcactgataattcctaaaatagctactatacgtggaattgtcatgctcggatactgcggtatatgtaagaaagcaccaagacctgctatcacaccacatactaacgcaatatatagaaattgcttcaaatcattcactcctaaattgttattacactattacacatagctaatcatcaatgtgaaatcgccttcaaagacactatccaaatcttcagaagtcaaaataaagtttgtaccagtagtcagtttgaaaatttcaccatcgacaatcatttgtccttcaccttccaacactgtaactaaacagaactctctaggcttcatataatttaacgtgccagaaatttcccatttaaccaatgtaaagaaatcattcgatacaatgtgtgtacacttatggttttcaataatttcactttcaggcaaaatattaggtaatggtgcattgtactgaataacgtctaaagctttttcaatatttaacggtctatcattatattgattatcttgacgattgaaatcataaagtctatatgtaatgtctgacgattgcatcgtttcgtatgctaatattcctgaagaaatagtatgtactgttcctgctggaataaaatagaattctccaggttttactttaatatatctaagtatcgactctatcgttccgtgttgaacatgattcgcaacttcttctctagactctgctaaagtccctataactatttctgcatcttcttctgcatctataatataccaacattcagatttgccatattgcccgttttcatgctcataagcataagaattatcagggtgcacatgaatagaaagtgattctcttgcatccactattttagttagaagcggaaaatctttgcttgggaaatcaccaaacaattcacgatgttctgaccaaatacggtctaatgtttgaccttgatatggtccattaataatctcgctcgtaccatttggatgtgctgacacacaccaacattccccagttgtatcattgtctaattgatatccaaactcacttagacgttgaccgccccataattttgtttttaaaattggttgtaaaaataatggcattgttgcacctccattgtgattaagtaagcaatagaactctgatgttgttgttccattatattttgattttgttctcatttacatcgtattataaacttccacatttcaaattaactattagtgattgtaccatatttactaacattgcagtactgccaattaaagcgcttcacttaaatttacagtactttaacatttttaaaaattaatagcatagagattatctctctcttacatttgtacacatttccctttaaatttactcgcccattataccaattaataaacaactttaatagttgtgccatacattgttcaaattctttgtaaaatgcatagacaatacgtacttattcatacttataattcatcattttcaaaaaaataacgagttacgaaaacgtaacccgcttcaaatcatatttactatccttattaatccttttcaatttcaaattgagttaaagcatctttaatgtcctgctcaccactaataatttgaaactcttggtgattaaaatgattggatgtgacaatttcttttaatactgtcgcaacatcttctctaggaatttcacctttaccatcaaaatattgtgcagcttctatctttccagatcctgctgcatttgtaagtgcccctggatgtaaaattgtataattcaaacctgaacgtcttaaatagtcatcagcgtaatgtttagctattgtatatggctttaaatcaccgctatcatcaaaagcctgacgtctcgaatcatatgttgaaaccatgacatagtgtttaatattagcctctttactcgcaatcattgatttaacagcaccatctaaatcgacaataattgttttatctgcacccgtgttccctccagaacctactgaaaagataactttatcgaatggtttaaacgtctcagttaaagtctctattgaatcattttcaacatcaacaagaattgctttcataccttgtgattttaacgcattaagttgatctgattgcctaacaccagcagtaaatggtacattttcttttgctaattgttgcactagtaacgaacctacaccgccattagcacctataaccaaaatattcatttacaacactctcctatttattattctctatgccataccactttatgagatatgtaaaacttgttacaactataaaaatcaattgacatactactgggaacgtattaaattaatatatgaacaaatattcatatgaaaggattgtcatataatgtcagaacaatattcagaaataaatacagatacattagaacgcgtaactgaaattttcaaggcattaggcgattacaatcgaatacgtatcatggaattgttatcagtcagtgaagcaagtgttggtcacatttcacatcaattgaatttatctcaatcaaatgtctcgcaccaattaaaattacttaaaagtgtgcatcttgtgaaagcaaaacgacaaggccaatcaatgatttattcattagatgacatccacgtagcaactatgttaaagcaagccatacatcacgcgaatcatcctaaagaaagtgggttataatatgtctcattcacatcatcatcatgaccatatgcatagtcatgtaactacaaataataagaaagtattgtttatatcgtttttaataatcggtctatatatgtttatcgaaatcatcggcggtctccttgctaacagcttggcattactatctgacggtatccatatgtttagcgacacattctcattaggtgttgcacttgtcgcatttatttatgctgaaaagaatgccacaactacaaaaacatttggttataaacgtttcgaagtactcgcagcgttatttaacggtgtaacgctttttgtaataagtattttgattgtttttgaagcgattaaacgtttctttgttccttctgaagttcaatcaaaagaaatgttaatcattagcattattggtttaattgtcaatatcgttgttgcattctttatgtttaaaggcggcgacacttcacacaatttaaatatgcgtggtgcttttctacatgttatcggagacttattaggttcagttggcgccattactgcagctattttaatttgggcatttggatggacaatcgccgatcctatcgcaagtattttagtttccgttattattttaaaaagtgcttggggtatcacaaaatcttctattaacattttaatggaaggcacaccaagtgatgttgatatagatgaagttataactactattaaaaaggattcacgaatacaaagtgtgcatgattgccatgtttggacaatttcaaatgatatgaatgcattgagttgtcatgttgttgtagaccatacattgacaatgaaagaatgtgaattattattagaaaacattgagcatgatttattacatttaaatattcaccatatgactattcaattagaaacgcctaatcacaaacatgatgaatcgattatatgttcaggaacacatagtcattcacataaccatcatgctcatcatcacgcgcatgcacattaataattttaacctactgccattgcatcgattaaacttttcaatggcagtaggttttttatgtctttatggcgacttgtttggtctttgatgatgcaatgtttattaacaaattttcaactattatttcttacattagtcatatttttgacaatttactattataattctctaactttagtcactttaattaatttttattagatattaatatgaaaataacgtgttttttgttattgtatttatatgaagaaaaggaggcaccactttgtttacttactttaaatcagcatttaaaaatgctaaaccacaattattaataacattgatatatgcacttatagcatttgctgtaattgcagttgtatatttacttgctaatttccagcttgctaagtatgtacaaactattgcaatttattcacaatttgggcaaaaaccaccagtagatgcatatttaaaagttatcgctgtattacttatagcagctgtagtttcactgtttgttttagttcaaatttttatcggaattacaaatgttatgaaacgagcaatgagtcatgaaaaagtaaaatttaccgatttatttattgcatttaaaaaaggtaattatttaaagagcgttctgataggtcttgtatctatagcaatgattatcgttctttcacttctgacatcattactatacaaattattttctccagtatcagaaatgattatgaattcagtacaatcatcatatgcagatagtacacacctgattggtattgctattacaactcaaagcatcataatcattgttgttttattgattaaagcaattattacttggttattgttaatacctgttttcaactttatgactagtttcgttgaatcaactaacgataaagtaaaaacacacttagctaatggatttaaagcaatgaaaaatggtcaaaaaacatttttcaaatttttcattggaatactattattaaacttaattattattttatttaaaacacctgttggttacttgatttcatttaatacgcaatcactctctcaaagtgttgcagaaaatatcataagagtttatacagtaatgacaattattttattcgttgttattcatgcaatcattttaatgggtatcgttcaatattacttaaaacgtggtcaaaaaattactaaagataaagtaaaaacagctgacaagaataaaaaagttgtcactgaaccaaaaaatacaaaagtagaaaatgataaagtgacaacatctgttgaaacaaaaacagaaaaagcacaagattcattaaatgataatacaacaaaaacaatgacttcagataaaccagaagacaatcaaccaaaataaattttagagccccttacaactttagttgttaggggctcttatgcatgcgcttagcgcaggcgctcctacttttcaactttagttgttaggggcttctttctaaaataactaagtgaattatctatatatgaagaggtctccaatactttttatataattcgtgattacattctatacttttaattgtattttctgctgtatggaaagttggttttattaattctgattatgttcagaactacaattcataagaaaaatgtgttaaaatatatttgtagtaagtagaagcaaaagatgaaaatctttaactcttgaaacacaaaaagggcaacactcggaaacatgttaccctaatgagcccgttaaaaagacggtgaccttatattttatttaaaaatagccttcaaaatgccggtcaaagcgaatagaaggttattttttatggtcttgagtactaatcaatactaaaccaatgattgttaatacaaccatcagcatttcaaaatcagacatgctagtcctttctaggagtaacaactataaccataggcatcacccctttattaagagattagccaccatctatccaacttgctcaataaatattataacatgcacacttttaaacagtaattcatagtataagttttttcatttcttaatcaactcgataaacagttgagtgacatacccttgtctaactagctatttcttcccctgttatcgtttgttcatcatataaaaatttaatttctcattttttattctctggtaaagaagagcaccaaccttttcggctgatatgctcccttcaaaatagacattgaaaaatgaaaactttgaaagagaaatcgtcagtctattattgataagtattatcctatcctcgaaaaattactttcagacactagtgaacaaaaattttactataagcgtatactttggcaatattcgaaggaaaaacatggattaacctgtgcatattatacatttagagcttatatacttaaacatgatgaatttactccttatattatgaaatgttatcaatagatgtcgcctaaagatacaacaagattcgagacaaaacctgatcatcaagcacagtttgactggaaagaaagcattaactttaaaacgaaagataatcaaaggattccactatatataggtgtgctactactttattattctcgttttataatcatgcataacaatgagtaaatcaagtgatgccttatttaattcattaacacaatcgtttgagctaatagaaggtgtatataatgaacttgtaacggataacttgaaaatagtcatgtataagccaagaaaagaaagtacaagtggtcgaataaatcgtagatttaaataattcactgatggttttaaatttcaagtaaaaccttgtatttccggcctccctagaaaaagataaagttgaatcaataacaaaaatattagatgaaattaatgcttaccaagacgaattgcatttggaagagattcctaagtttttttaatcttaatgaacgatttaactactaagttcatactagtacaggtaaattgcctattactgcctaagagaaagaaaaaattttcttacaaccactacagaatgtgaatgtaaaaaactcatataaagtgaaacatatcttacttatggaatgaaatgtttgattatcccaaaatcacaaatgcgattttggagttgttaggggctctaacgcaaatacacccctacttaaaataacggtagttgttatagtatacttaaatgcataaaccatataaaaggtgatgctaatatgacatacggttcaattgtagctatactctgtgccctatttgtgattttcttcattccatatatggagaagaaagacaaaaagaagaaataacactagtatctggattactagcatacaaaggagcagtaagacattttctaatagaaaataactttactgctcctttgtaaattactcttcaactattgtaaattaaataataaataactgccgatgttattaatcagctaaaaaatgctttgctaaatattttgctgcgccatcctcttcattcgtgtatgccgttacatctgaagttaatgcttggatttcagggcgtgcatttttcatagcaactgtataatgaccaaattcaaacattgctctatcattgtcgctatctccaataactaacgtttcttcttgatgaataccaaaatgtgcaatcatttctttaatgcctgtacctttatcagtttgataagccattgtttccgcattaaatcttgatgaatttgaaacactaatctgtagttgcacatgattttgctttaattcatctctaaatgctgttattttttctaaattagaactgaatagataaatttttgaatattcaccttcaggaaacttagttacccaatctatcttaccagcaagcgcatcttgtcttgaagaccattcactatgacttacgccattaataggatcttgactacgaatcatatctcgcatccatgtttcatcttcttttaaagaaactctattaccttcaaaaggaaatacctcataataaatttgttggcgcttagctaaattagtaatttgttgcacttgagccaatgataaaccatgcttgaagataatttctccatctacttctccaattgttccatttgaactaatgatgccattaaccgcaaaatcttgaggtacaagttgatgtatttcagaatgcgaacgtcctgttgccaaaaatactttatatcctttctctctcaatcgattaatgacatctttcgtatacggtgatgcttgattattttcatgtaaaattgttccatccatgtccaaaaatattgcttttacgttatccatattgccctccactgtccattttatcttaattaaattttgtcattattagttagtatttgcaaaatatttactctaacattgccatagaaaatcgattattccatctttgaactgctacatttttctggaaaaatcgtgacatgttttcagatgtcaaaatatcatctattaatccttgttgtacactttccccatcttttaatagcaaaattttagtaaagttactagtaatttcttcaataaagtgcgtaacataaatcatcgcaagcattggatatgaatctgacaatgagtcaagtatacttaacaacgattctcgtgcaataaagtctaaaccagctgctggctcatctaaaattaaaacctggggttgccccattaaagctcgcgcaatcatcactcgttgtttttcacctgtagataaataaccaatatattgttgcgctttagcagacattccaactaatttaagtaattgatgtgcttcattacgtacttcttcatcaatatcttgataaacaccaattgatttaaaagcaccgcttatcaccacatcgattactctttcaccctcttgaaacttttccagtaaactatgagatacaaaacctatatgttgtcgtacagtctctgcagaataccctaccttgcctggcattttaccgaaaaggttaacagttccagatgttgcaggctcatacgcatttaaaatatttagaagtgttgtcttgccagcaccattcaacccatataatatccatttatcacctttagcaatttgccaagaaatcttttttaaaattgtttttccttgcttcattcgcccaatttgatctaattgaattaacatgcgaggtcacccctttattgctactccatacttctcataaaatcatattaacataacacccttaattgtcagactatttaaataaataaaacacttcatttttacgcatttctgccaaattaagatgaagtaaaagctaagtcgacctaaaaaagcacccttctagtcgattaatctaaaagggtgccatatactttaattttaatacatgattgattctaaaaaagtgaattattccacagtaactgatttagcaaggttacgtggtttatcaacatctaaatctctgtgtaatgctgcatagtatgaaattaattgtaatgcaaccactgatactaatggcgttaacaattcatgtacatgaggaatgacataagtgtcgccttctttttcaagaccctccatagaaataatacatggatgtgcaccacgtgctactacctctttaacgttaccacgaattgataaattaactttctcttgtgttgctaaacctacaactggtgtaccttcttcgattaaggcaattgtaccatgtttaagttctccaccagcaaaaccttctgcttgaatgtaagaaatttctttaagttttaacgcaccttctaaacttacgttatagtcaatagtacgtccgataaagaatgcattgcgtgttgtttctaagaaatctgtagcaatttgttccataattggtgcatcgtcaacaattgcttctattgctgttgttacttttgctaattctctcaataaatcaatatctgcttcacgaccatgctcttttgcaacgatttgagacaagattgataatactgcaatttgtgcagtatatgcttttgtagatgcaactgcgatttcaggacccgcgtgtaataacaatgtgtggtctgcttcacgtgataaagttgaacctgcaacattagtgattgttaatgatttatgacctaatttattagtttcaactaatacggcgcggctatctgcagtttcacctgattgagaaatataaacgaacaatggtttttcagataataatggcatgttgtagacaaactctgatgcaacgtgtacttcagttggtacgccagcccatttttctaaaaattctttacctactaaacctgcatggtagcttgtacctgctgcaataacgtaaatgcggtctgcttctttaacatcattgatgatgtcttgatcaattttcaagttaccttctgcatcttgatattcttgaataatacgacgcattactgctggttgttcatgaatttcttttaacatgtagtgtgcataaacacctttttcagcatctgatgcatcaatttcagcaatatatgaatcacgttctacaacgtttccatctgcatctttaataataacttcatcttttttaacaataacgatttcatggtcatggatttctttatattcgcttgtcacttgtaacattgcaagtgcgtctgatgcgataacattgaaaccttcaccaacacctaataataatggtgatttatttttagcaacatagattgtgtctttgtcttcagcatctaataaacctaatgcatatgaaccatgtaataatgacacaacttttgtaaatgcttcttcagttgaaagtccttgatttgaaaagtattcaactaattgaacgataacttctgtatctgtttctgaaatgaatgatacaccttgtaagtattcaccttttaactcttcatagttttcaataacaccgttatgaactagagtaaaacggccatttgatgattgatgtggatgagagttttcatgattcggtacaccgtgtgttgcccaacgtgtgtgaccgattccaacaggtccatcaaaatcgctactatcagcaactttacgtaattctgcaatacgacctttttctttaaatacagttgtattatcatcatttactactgcgatacctgcagagtcataacctctgtattctaatttttctaaaccttttaataataattctttggcattatcatagccaatataaccaacaattccacacataacgacattttcctccatattggaatagtacgcgtaaattatgatttattgccgataatttagattgacaatctgctttcataatataaataggaacatgctatcatcgcattcatccataacaaattaagcatagttatttttacaactatacaaattgctcacactgtactttccatattaatattttttatattcaatttctggcgatcttattaactttgtccattaagtcaccctaatgttttacttaataagctaacgaatgagccacatccgggatagcatccgccgatctattcgatcactatcctcctcgtctacaaatacatatattgcactctataaaggccactcatatattaacctttaatcttcaaatacaaatatttatttgcacaggcgctttaactgtactgccgaactttccccctttccattaatcattattgtacaacggtgttgttttgttttgcaaatattttcacaataaaattttaaaaatcctaaaacaatttttttgttttactttttcaaaatatctatactgtcacattgatgacactttatttaattttgtcacatttattttgacaaagttgatttttgtttatattgagtaacaagtaacctctctatacactatatatagtcacatatattaaaaaagaggtgtaaacatgtcacaaactgaagagaaaaaaggaattggtcgtcgtgttcaagcatttggatcattcttaagtagtatgatcatgccaaacattggcgctttcatcgcttggggttttatcgcggccatttttatagataatggatggttacctaacaaagatttagctactttagcaggaccaatgattacttatttaatcccattattgatcgcatttagtggtggtcgtttaatttatgatttacgtggtggtatcatcgcagcaacagcaactatgggggtcatcgttgcattacctgatacaccaatgttacttggtgcaatgattatgggtccacttgttggttggttaatgaagaagaccgaccaattgattcaacctagaacgccgcaaggttttgaaatgttatttaataacttttctgctggtattttaggatttatcatgacgattgcaggatttaaaattttagcaccacttatgaaatttattatgcatattttatcagtggcagttgaagcattagtacatgcacacctacttccacttgtaagtattttagtagagcctgcaaaaattgtatttttaaacaatgcgattaaccatggtgtattcacaccgcttggtgcagatcaagctgcaaaagctggtcaatcaattttatacacaattgaatctaaccctggaccaggtttaggtatcttacttgcttatatgatttttggaaaaggcactgcaaaagcaacgtcatatggtgctggaattatccacttcttaggtggtattcatgaaatttatttcccatatgtattaatgcgtcctttattatttatcgctgttattttaggtggaatgactggtgttgcaacttatcaagcaacaggatttggatttaaaagtcccgcgtcaccaggttcatttatagtttactgtttaaatgcacctagaggtgaattcttgcacatgttactcggtgtcttccttgctgcacttgtatcattcgttgtagctgctttaattatgaagttcactagagaaccaaagcaggatttagaagctgcgacagctcaaatggaaaatactaaagggaaaaaatcaagcgttgcttctaagttagtatcttctgataaaaatgttaatacagaagaaaatgctagtggtaatgttagtgaaacatcttcatcagatgatgatcctgaagcgctattggataattacaacactgaagatgttgatgcacacaattacaataatataaatcatgttatttttgcctgcgatgcgggtatgggttctagtgcaatgggtgcaagcatgttacgtaataaatttaaaaaggcgggcattaatgatattacagttacaaatactgcgattaatcaattgccaaaagatgctcaattagttatcactcagaaaaaactaactgatcgtgctattaaacaaacaccaaatgccatccatatttcagtggataatttccttaattcaccaagatatgaagaacttttaaataatctaaaaaaagatgatcaagcataataattaaataaattaaaaaatggaggataccgccatgttattgagtacacgtgaaaaagaaatgatagccctattgattaagtaccacggtcaatatatcactatacacgacattgctcagcaacttgcggtgtcctctcgtactattcaccgtgaattaaaaggtgttgaagcatatttaacttcattttcattaactttagaacgcgcaaacaaaaaagggctacgcattgctggcacagattctgatttaaacgatttgaagcaatcgattgcacaacatcaaaccattgacttatctgttgaagagcagaaagtaattattatatacgctttgatacaagccaaggagccagttaaacaatatagtttagcgcaagaaattggcgtttctgtccagactttagcaaagatgttagatgatttagagcttgatttaaataagtaccaactatctttatctcgaaagcgtggcgaaggcatttacttggtaggtactgaatcaaagaaacgtgaatttttaagtcaattaatggtgaataacttaaatagtactagcgtttattcagtaattgaaaatcattttgtctttcattcattaaatcaaatccacaaagactttgttgacttagagcgcatttttaatgttgaaagactattaatggactacctaagtgccttaccctaccaacttaccgaatcaagttatttaactttaactgtccatatcgtgctatccatttcacgtataaaaaatggtgagtatgtcgcattaaacgatgatatttatgattctgtacaaaacacatttgaacacaaagtagcaagcgaacttgctgataaacttggtcaaatatatgacgtcacgtttaatcaggcagaaattgctttcattactatccatttacgtggagctaaacgaaaaaatcttaatgatacatcattaaataatcgttgtgaagaaaacaaaattaaagcgtttgttaacaaagtagaaatgatttccggtatgacatttgcagatttggatactttagtagatggactgacgctacaccttaatcctgcaatcaatcgtttgcaagctaatatcgagacctataatccgttaacagacatgattaagttcaaatatccaagactatttgaaaatgtaagattagctttaaatgattgttggcctgatttgatttttccagagagtgaaattgcttttatagttttacactttggtggctcgattaaaaaccaaggtaatcgatttttaaacatattagtcgtttgcagcagtggtatgggaactagtcgtctattatcaactcgtctagagcaagtttttagtgagattgagcgtattacacaagcatcagtcagcgatttgaagtcactagatttaagtcaatatgatggcattatttctactgtgaatttagacatcgactccccctatttaacggtaaacccattattaccagatagtgatatcagttatgtcgcacagtttttaaatacaaagtctacgttccaagagacgcatgataaatcatcaaacatgattgataaggatgatgttcatgttgaaacgaaagatattgatggcaatacatcttttgaaaatgaacaaacttcatacttaacttcagttttcgaaaaacatttaagtgacgaaaaatcagaacaattaatgcatcatatgcgttcgggtttaactttgcttgattcagtgaaaatagttagtaccgaagttaaacagtggcaaacatatatcgcagattatctatatcaatgcgatgcaataaacgatccaacgtcattcgctgaactactagagcaacgattgattgacaatccaggatggatattaagtccatatcctgttgcgataccacacctaagagacaatatgattaaacaccctatggttctaatcacagttttagaagaaccgttaatattgcctagtattcaaaatgacaatcaaacaattaaatatatgatttccatgtttattcctgacaatgattttatggcatcactggtaagtgacttgtccgaatttttaagtttgaaattagaatctattgatacttttatggaaaatccacaggaacttgaaacattattaagaaacaaatttttagaacgaattaaaaaacaatttatttaggagtgtacaaaatgagcgaattatttagtaatgacaatatctttttaaatgtaaatgttaacagccaaaatgaagcaattgaaaaagcaggtaaagccttagttgatagtggtgctgtaacagatgcttatattcaagcaatgaaagatcgtgaacaagtcgtatcaacatttatgggaaatggcttagcaattcctcatggcacagatgaagctaaaacaaatgtgattcactcaggtttaacattattacaaatccctgaaggcgttgactgggatggcgaagtagttaaagttgtcgtgggaatcgctggtaaagatggcgaacatttagacttgttatctaaaattgcaattacatttagcgaagaagaaaatgtggatcgtatcgttcaagcaaaatctgcagaagaaattaaacaagtattcgaggaggcagatgcataatgaaagcagttcactttggtgctggtaacataggtcgtggtttcattggttatattcttgcagacaacaatgttaaagtaacatttgcagacgtcaatgaagaaatcattaatgctttagctcatgatcatcaatacgatgttattttagctgatgagtctaaaacaacgacgcgcgtgaataatgttgatgcaattaattcaatgcaaccttctgaagcgttgaaacaagcaattctagaagctgatattattacaacagctgttggtgttaacatactacctattattgctaaatcttttgcgcctttcttaaaagaaaaaacaaaccatgttaatattgttgcttgtgagaatgctattatggcaactgatacattgaaaaaagcagtacttgatattactggccctcttggtaacaatattcattttgctaactcagcagttgatagaattgtaccattacaaaagaatgaaaatatattagacgttatggttgagccattttacgaatgggttgttgaaaaagatgcatggtatggcccagaactaaatcatattaaatatgttgatgatttaacaccatatattgagcgtaaattattaactgtgaatacaggacatgcatatttagcgtatgctggtaaatttgcaggtaaagctaccgtattagacgctgtaaaagatagttcaattgaagctggcttacgccgtgttttagctgaaacaagtcaatatattactaatgaatttgattttactgaagcggaacaagctggttatgttgaaaaaataatagaccgtttcaacaattcttatttatctgatgaagtgacacgtgtcggacgaggtacgttacgtaaaattggccctaaagatagaattataaaaccattaacatatctttataataaagatttagaacgcactggtttattaaatacagctgcattgttattgaagtatgatgatacagcagaccaagaaactgttgagaaaaataattacattaaagaacacggtttaaaagcgtttttaagcgaatatgctaaagttgacgatggcttagccgatgaaataattgaagcgtacaattcactttcataatttattgagctttgtttgaaacaagaagtttccaacgttattcgttaacaatcagtaataatgtagtagttccgttgaattaacaatattaaatttctgaacataaaaaaatactcccttcaacatagacacttaacttgtgttatgtatgaaaggagtatttttgcgttaataatttgttttattttcgagccacagccacctattcaatggctattggtcattactaaaacaaattcatattaactgttagacttggttacttagtaaggaatatttccctatgaaataactagatgttcacattcttgaataaattttattcttcagtttgttggtctttcttagtgaatcttctaattaagaatgccatacctgcacctagagctaattcagcatatggtaaatcgtcattatgtgacataccagtatctggtaaagttttagcttgttgtttaggcttattaacttttccttgttggtctgattttgcatttgctttgttttcttcagtcttagttacattaagcatatcttgatgcatactatgactaccattagaaactgttgctggagatgcattggcaccgtcgttttgcgtagctttattgtttgcaactgggccaactgatgtttgcgtatcattagtttgcatatctttagctttattgtttgcaactgagccaactgatgtttgcatatcattagtatctgctgttgccgtatcatctttttggctaacattagttgaagtcattttttcttttgcttcagaagatgcagatgttgatggtttattcgaaacttcagtatcagctttgcttggcgatttatctgcttcgttagatgcaacgttagtttcagacttaagttgtcctgcatcagtttgatttgacgtactttcctctttatcttttgatgtattagaaggtacatttggttctgttatgtctgctgaaggcaatgtttcagttgttgattcaaccatactttgatttgttgaatctctaccatctttttctgccttagctttattttcagattttggttgtgcaaccttgccattagttgattgagattcagcactattatttacttcagcattttgttttgaatcatttacagatgcattatctttactatcagcagatgatgctgcttctgtgctcgcagttgttggagccgtcgttgttgatcctgttggtgcattctcgtttgttgctgtagttgtactattgttatttgttgtgctttctgctggcgttgcattatctgtttctgttacaggtttatcagttgtgccgttattagttgattctacttctggtttactagttacatcgttatccattgtcggactgtttgttgatgcatctgcactagaattgttattagcttgcggtttatcctttgcatcatcagttgctgatgttactgttgtttcacctgttgccgcatcactattatttggtgttgtcggagaagcgtctgctttgccattatctgtcgtctcagatacgttaggttgtccagtgttttctggtgttgcattagcatttgaatttgctgttgcatcattattatctgtaccattattagtatcattagcatctggatcattctgaggcacaatcgcttcaattgcaggtatcgttacattttgtaattcagcaacctctgtatttgtttgtgttttatctaatttatcagcaaatctgtcaaaatatctacctaaatctgtacgtgcaatttctttcgccgatgcatctgcatctgcatttttaattatttctatttgcttgttaaccacttctctaattgcttccaaagcatttttcttaactactggattaatacgttgtgctttaagttgttcaagcgcactatttttgacagtagcgatttctgcatttgtagtttgatcagaaatatcttcagttgcttttgataaaatgtcttctaaagcattcgtaaacgcttctttttcttcagttgtagcatcagcgtcgacatttacacctgcttcaatctggtctagtgcagtttctaattcttcgatagctttttgtttttctgttgagtcgatttgaatgttatcaaatgcttcaagtccttgagctttcgctttttcaacttcagcagttgttgttgcatcagtaataccttgtttagcttgatctgtaatttgtttaatcattgctaatgcttcagttttttcttcagcagttaactggtcactttgatcaatagattctttcgtatcttctgctttaacttcaatagcttggttcgctttaggtttaacagtagcatctacttgaatagcatcaattgctgctttaccttgtgttaatgcatcatcaacgtcaccattatccacaccattattaatgctttctaatgcagtttgaacattttggtcaacttgcttaattgcttattgcttttcatcttgtgttgcattagtgtcagctgaaatattatttttcttctgatctgcataagcatataaatctgttgtagctgattcttttttacctgttggaattgtgtaatcgttaatattatctaagtcattatgaatttgaacttcaatgtcatctttagaagtagcttgattaacattttgatccgcagtttgttttaattcagcaagtttttgtttcgcttcagcaatttcacttgaagtcgatgcgttagagttatccgcttcgtttactttagcattatatgcatcttcaattttagctaaagcatcttttttgtactcactaaatgttttaactgcattaattttagcttttccttctttaactgcattatcaacatattcatttgttgatgattgatcgacatttgttttcgcttgatttaattcagtatcaacttcttgttttgcatcattaatttcttgttgtgatgcatttggtgtttgttctatttgtgttttcttatcagctgcagcttgatctaattcttttttacctgctggtttcttaacaggatttgcatgaagttgttgaactttttgtactgctgtatctttagcagtagttacatcacctgtagtagttgctgcattaatattatttaaaccttcttcatatgctgctctaactggtccaatatcgttacctttttcttcattagtagtctcattattattaagtatttcagttattttattttgcatttcagttagcaattccgctcttgcattcgttttaacatctgttgatgcttgaattgggtcgatggcttgaattgcattatcttttgcagtgtttacgtcatcaattgactgtgcattttcaatattttgattaccttgtgttaattgtgcgtctacttgttgatttgcttgttctttttcttcagtagtcgcatctgcagtttgtgcaataagcgctttttgttcgtttgcttttgttgctaattcatctttcgcaacatctttaattgttgtatctgcagtaataccttgaatatcagcaactgcttgatctttaatttgcgtaacatcattagttgtttgtgcatttaagatatcttgatacgctttttctttagcttttaaaactaaatcttttgctgcatttttctcttcagttgtagcaccagttgtattatcaattgcttgattttgagttgtcacagcttgatcaacatcatttttagcatttgatttaaccgatgttgctggttgcgtgctttgaattgaattctttccagcgtctttcgcctgatctacaccattatcatcagttgcagctgtaatattatttttcgcgtctgtaactgctgttgctaattgttgaatagctgcttctttttcttcagttgtagcgttctgatcattattgataacatttgtttgcgttgcttgtaattgatcaatttcatctttagccgtttgtttcttcacaacttttggtgttaccgcattaatcgctgcttctgcatttgttttagcttcatcaacttgtgcgttagtagttgctgctgcaatggcttgaattgctttaccattttcagtatttgcttctgcatcagctgcttgtttttcttcatctgttgcatctggcgtagcttgaatctcttgcaatttgttatttaaaattgctgtgatttcattacgtgcagttgcttttttattaactgttggtgttacttgatcaatactagtttcacctgtcgttttcgcttggtctacatcattttgactattagcagcttcaatgttgctatttgcttgtgtcacagcattatctacgtccgcattagccgctgcaatttcttcagcagtaatgtcttgcgtttgagcgattgctgttttacgttcattcgctttcgtagcaattgcttctttcgcattatctttagttgttgttgctggctgaatcgcttcaattttagcaatttctgcatttttagccgcttcaacttccgcatttgtatgtgctgcatctattgctgcatcagcagtcgttttttcagtttggacttgttgtttcgcagctgctttttcttctgttgttgaaccgttattagcatcaattgctttttcttgagcttgtactttatctgcaattgcttgtttcgcttgaggtttaacatttgcatcaggtgtaatggctgcgattgtagcttcatttgtagtttttgcattatctacatctgtatttgctgcagcattatctatatcagcgtttgcagacagaacagcttgatcaactttttctttcgctgcttgttgttcttcagtagtcgaatcattcattgcttcgattgctgttttacgttcacttgctttttgagcaatttctgctttagcatccgatttcttagttgtggcagcttgaacttgattaattgcagcaataccattgtctttagctgttgttacagcactgtttgtatttgcagcatcaagatttgttcttgcttcttgctttttagtatctaattctgtatatgcagcttgtttttcttctgtagttgaagcattgctattttgaatttcttgtttacgtgtattatatgcgttttctacttctgtatcagctgcaggtttaacttttgcttgtgtttgaattgcattgattttatctaatacttttgattttgtatcagcaacttcctgttttgatttaacaacttggatgtcatgtaaaccttgcttttgagctgcttctactgctgcatcagcttctgctacttcttcatttgttgcatttgaaactgtagcattttgagcttttctagctgttgcagcttgtttaacttcattataggcatccatttttgtttgcgtagagtcagtaatattttcaatttttgagatttcttcgtttttaactctttctaaatcttgtgcagtcgttgtcgcttcaattgctttaacaccagaaactttagctgcattaatacgttcaatagcttccgctacttcttcatttgttgtatcaggatttaaaggtgcttgatcaatttgtgcttgaacaacttcgtcaaattcttcaagagctgctgctttagctgttgtagcaggtgtagtttgattaatatcattgattgcttttgttttaatggcttctacttgtgcatttgttgttgctgcatcaatatctttaattgcctttgtttcaattttaccaattttatcatttgctacatctttttcatcttgtaatgatgcatttgactttttaatttgttgtttacgagttgtaactgcttggataatatcttgtttcgcttgaggtttaactgttggtgtaatcacatcttgttctaacactgcgataccattatctttttcagttgtgacaccttgtgatgttgtttgtttattaatttctgcgattgcattatttttatcattgttaattttagtcacaagcgctgcaacttcatcttgcgtaacttttttactttgttgtgctgctgtaaccttttcttgagctttagtatctaattcagcaattgctgcttgattatcaattaatgcagcttgtaatttagttactaaaccatcaatatccgcttgagatgcacgatttgcagtttcaacatgattcgcatcttcatttaaaatagtatctgcttgttgtttaagtttattgtattctgcaattgatgctgttgtgtaatgactattatcaacttgtgagtttacttgttgttgcaacgcatctttgttcatttcaaccgctactgaaaatggatctgcagttagtgtaacttctggttgcgcattattaattacaacatctgaagcagtacgatatgttaatttttcattaaaatcaatatttttaggtgtatcgatattcgcaacattaactttatatgataattttaaagatttatctgggaataaaacttctttagtgtgtgtaccacgtgccgttgtcacaccttggcttgtaaatgtaactttatttgcagtttgatcataattaacagtcatatttttcaatactgtactgtcttcattaccattagggaatgttgtagttaatgaatcattaatgtaagttacaccttgtggtaatgttacttcatatttaaattgatctgctttcaatgaagcaccaaaattaccattgttaccgatttcagtattaattgtaaattctttattatttgttgctttcggtgctaaatctctatttttgacatataaatgtgatcctgagaatagacctacattatcaatgaatgaatagtatttataaccatctttatttgttgtaattcttgaagcatcagcaactgctgtattgtcaggaataaattgtaaatctaaacgatcagcatctgttggtactttaaataagtgtgcagtaccagtcttagctacatttacagttgctaattcagtatttttcttagcatctttaataactaaatttgttgcaccttgcttactattcgtttgcatagtagtaaagttgataattaattctgaatctggttttacattaacagtttttgaaataccgttaaagttaccatgatctgtagaatcatttgcattcacacgacctaatgcagctacatttcccctagcttgatagttctgagggttattcttatcaaacatatcgcttcgtcttaattctgagttaacgaaaccaatcttaccgttgttaattaatgaataaccatttactttatctgtaacagttacagttggatcctgtctattctcatctgttgatatggcaggatcatcaaacgttaatgttgtattaatactgccttcaccagtattgctagcatttggatcttgagtttgtgcgtttgctgctacaggtgctgctggttgcgctgctggagcattcgctggctgtgtttgatttgccggtgttgcttggttatttccttgtcctgcttggtttgccggtgctgcttgatttccaggttgtgcttgtgcagcgttatttggatcagcttgattaccttgtccagctggttgtgctgtacctgctgccggttgtgctgcgcctcctactggttgtgctgcgcctcctgctggattagcctgtccaccttggtttgctggttgtgctgctggttgtccttggttcgcaggtgcagctggttgtgctgcaggattagcttgagcaccagcatttgcgttaggctgtgcattggcatcagctggttgtgctggttgattttgtgcaggctgattttgctctgctgcagacgctgttgtcgggttaatagatataaatgtaacagtggcaattaaagctgaaaaaataccgacattaaattttctgatactaaatttttgttgtctgaataaattcattaagtcatcctcctggttgattattctcgctgttaaatgatttcacttaatcaactgttaagataagtagtagcatctgcgttaaaaacacaaagcaactctatctaattaaaattaattttatcatcattatatattgagtaccagtgtattttatattacatatttattactttgtttttattttgtttatatcattttacgtttgtactataaattatttctagaaacacaaaaaaccgatgcatacgcatcggcttatttgtaatacagtatttatggtatttatttatctaatcccattttatcttgaaccacatcagctatttgttgtgcaaatctttcagcatcttcatcagttgctgcttcaaccatgacacgaactaatggttctgttccagaaggtcttactaaaattcgaccttctccattcatttctacttctactttagtcataacttctttaacgtcaacattttcttcaacacgatatttatctgttacgcgtacgttaattaatgattgtggatattttttcatttgtccagctaattcacttagtgatttaccagtcatttttattacagaagctaattgaataccagttaataaaccatcaccagttgtattgtaatccatcataacgatatgcccagattgttctccacctaagttataattaccgcgacgcatttcttctactacatatctgtcgccaactttagttttattagatttaattccttcttgttcaagcgctttgtaaaaacctaaattactcataacagtagaaacaatcatgtcattattcaattcttgatttttatgcatttcttgaccaataataaacataatttggtcaccgtcaacgatttgaccattctcatctactgctatgattctgtctccatcgccgtcaaatgctaacccaaaatcactttcagtttcaacaactttttctgctaatttttcaggatgtgtagagccacatttctcattgatattatatccatcaggactacatccaattgtttcagtatctgcttctaaatcaccaaataagaatggcgctaatgatgatgttgaaccatttgcaccatctaaaacaattttcaaaccttcaaagttaacatctactgttgattttaaataactcaaatatttttgtgccccttcaaagtaatctgaataatgtacaatatcattaccaactggtcttggtaattctgggttttcttgatccaataatgcttcaatttcattttcttgttcatctgatagtttaaaaccatctgatccaaagaatttaataccattatctgcaactggattatgagaggctgaaatcattacacctaactctgcacccatatcgcgtgttaaatatgcaacacctggtgttgaaataatacctaatcgcatcacttctgcaccaattgaaatcaaaccagctattaatgctgattctaacatttcacctgaaactctagtatcgcgacctacaagtacacgtgggtgtttttcacctttattatgtgctagaacatagccaccgtatcttcctaatttaaatgccaattcaggtgttagttcttggtttgcgacacctcttactccgtctgtaccaaaatattttcccattgtttactctcctttaatttagctatttattttacatttatataagccttcgtttcacttggttgtgctttagtgacatgttctggtaaattgatttttacagtcttttcagttgattctgaaataccatctaaatctacttctgcatcaacttcgcttatattttgtaagtcatctcgactaccgaagatttcaatttctttatcttctaaatcaatcgaacttaactctttatcatctgctaaactacctttctgtttaacatttactttaacctttttgctaaaaggctctactttaacttgtaaattcacttcattaggttgaatcgatacatttaatttattcagttttttatcaaaagccgttacttctgcgacatcttttgtgtcaccattaatctttttattagttttaaaagtggcttttaaataagcgatatcattcaattgttcttctccacctgttactttaactgtttgtggtgaaacttcttgctttgtaattttataaagtggatcaatatcactctgacttacatcaggttgaactgtcatctttttagttactttgttttcaagcgtaatatttgctaatttaggttttacagaataatgaatgtcatcagctaaccctttaacttgatacttctcttgatattttccagctttagcatttgataaatcaatcactactcttaaatcttctggattttcaatttttattatctttgattgtggtcctgaaatagtcacattaactgtttcaggcgcttttgttaaatgcaaatctttagtgttataaagaatttcaacgggtacatcttgaatcgttttactagacttttgaccaagattaccagtgttaaagatatttccaaaaacattgttaacagataaaaagaaaaacaatgccaaaagaaaggcaataaatctcaagccccatttactttctagcatattatttcacacctttcttttgaaagcgtgtgccaaaccaatgttcagcaagcaactcttcaaaaatttcgtttgaaatgtctcgtcgtaattttccatcaaatgttaccgaaatatcaccagtttcttcagatacaataacggtaaatgcatcagatacttctgaaataccaaccgcagctctatgtcttgtacccaaacttttagatatcttaggactatcagacaatggcaaataacttgctgctgctgcaatcttcgtgccttgaataatcattgcaccatcatgtaaaggtgtgttaggtataaagacattaattaaaagttcttgcgaaatatttgaatccattgcaatacctgtttcaatataatcttgaagacctgtttctttttcaaagacaattaatgcacctatacgtcttttagccatatattgcacagcctttgaaaccgattgaatcaatttctcttcatctttactatacgtattagaagtatagcgttttaaaaagctacctctaccaagttgttctaacgcacgtctaatttctggttggaatattactattaaagctaataccccccattgaataacgatatcgaataatttagatgttgcagtcaagttcaatatcatacttatctgctgaccaataacaattactaatatccctttaagtaattgtatcgctttagttcccttaaagaccgtgatgagaagataaagtacataccaaactatcagtaaatcaaggatactcgttacaatttttaacgtactgaggttttgaaaaaagttggaaaaatccataacatctcctccgggtaatatttttccataatacccattataccaatcatttacatcactgtcatacgaacatatatttaaatagaaaaaatttattttaaagattataactactcttaatcattttagtgaattaaaaaaagtagtgcaaaaagcaaaatatactttatacactacaaatcatttatttataataaagtttcaccaaaaaatgttccaactaatgaaaccgcttgttcagcagtatgattattactgtcaatcaatggatttacttcaactaaatccattgaggaaattaaatgtgattgatgcagtaattccaatgcaaaatggctttctctataactaagaccacccaaaactctagtaccagtgcctggcgtttcaagcggatctaaagcatcaacatctaaagataaatgaacgccatcaacattgcgtgacttcaaatattctattgtattttcaattacttcctttatccccaatttatcaatatctgacatagtaaatgttttaatattatgatctttgataaattgtctttcacctttatctaaatctctcataccaattagtacgatgttttctggcttgattacattactatttaattctaaaagttctttgggaccttcgcctgtcaaaatccttagaggcataccatgaatatttccacttggtgactcttcaggtatatttaaatcaccatgtgcatcataccaaataacacctaaattattataatgtttacttattgctgatactgaacctaccgcaatagaatgatctccaccaagaactagaggaaatctgttattttcaattgatgctgaaacctctttatttaatttttgattaacatctataatttcatcataatttcttaatcctttttgttcactatgaaatttttcaatgttcacaacaggtaccttaatatcccccttgtcatatacatcaaggtctaattgctttaatcttgaaattaatccagcatatctaattgctgttggtcctaaatcaacacctaattttctttgtccaaatgttgatggtgcacctataatatcaattgcttttgtctttgtcataagcgtccccctttgctctatgtaattaaagaataatgtatgcgcttaccattatcaagcaatagctacacatataatctgtttatcttattacttcataaaaaaaagcacttcccaaaaatggaaagtgcaagtagtgagccatagaggattcgaacctctgaccctctgattaaaagtcagatgctctaccaactgagctaatggctctaatggctgggctagctggattcgaaccaacgagtgacggagtcaaagtccgttgccttaccgcttggctatagcccaatatatagatggtggaggggggcagattcgaactgccgaacccgaaggagcggatttacagtccgccgcgtttagccacttcgctacccctccagcttattcatataatttaataatcaaaatggtggagaatgacgggttcgaaccgccgaccctctgcttgtaaggcagatgctctcccagctgagctaattctccaaaataatgactcctacgggactcgaacccgtgttaccgccgtgaaagggcggtgtcttaaccgcttgaccaaggagccatggctccacaggtaggactcgaacctacgaccgatcggttaacagccgatagctctaccactgagctactgtggattaatattatgcctggcaacgttctactctagcggaacgtaagttcgactaccatcgacgctaaggagcttaacttctgtgttcggcatgggaacaggtgtgacctccttgctatagtcaccagacatatgaatgtaatttatacattcaaaactagatagtaagtaaaagtgattttgcttcgcaaaacatttattttgattaagtcttcgatcgattagtattcgtcagctccacatgtcaccatgcttccacctcgaacctattaacctcatcatctttgagggatcttataaccgaagttgggaaatctcatcttgaggggggcttcatgcttagatgctttcagcacttatcccgtccacacatagctacccagctatgccgttggcacgacaactggtacaccagaggtatgtccatcccggtcctctcgtactaaggacagctcctctcaaatttcctacgcccacgacggatagggaccgaactgtctcacgacgttctgaacccagctcgcgtaccgctttaatgggcgaacagcccaacccttgggaccgactacagccccaggatgcgatgagccgacatcgaggtgccaaacctccccgtcgatgtgaactcttgggggagataagcctgttatccccggggtagcttttatccgttgagcgatggcccttccatgcggaaccaccggatcactaagtccgtctttcgaccctgctcgacttgtaggtctcgcagtcaagctcccttatgcctttacactctatgaatgatttccaaccattctgagggaacctttgagcgcctccgttaccttttaggaggcgaccgccccagtcaaactgcccgcctgacactgtctcccaccacgataagtggtgcgggttagaaagccaacacagctagggtagtatcccaccagcgcctccacgtaagctagcgctcacgtttcaaaggctcctacctatcctgtacaagctgtgccgaatttcaatatcaggctacagtaaagctccacggggtctttccgtcctgtcgcgggtaacctgcatcttcacaggtactatgatttcaccgagtctctcgttgagacagtgcccaaatcgttacgcctttcgtgcgggtcggaacttacccgacaaggaatttcgctaccttaggaccgttatagttacggccgccgtttactggggcttcgattcgtagcttcgcagaagctaaccactcctcttaaccttccagcaccgggcaggcgtcagcccctatacatcaccttacggtttagcagagacctgtgtttttgataaacagtcgcttgggcctattcactgcggctcttctgggcgttaaccctaaagagcaccccttctcccgaagttacggggtcattttgccgagttccttaacgagagttcgctcgctcaccttagaattctcatcttgactacctgtgtcggtttgcggtacgggcacctattttctatctagaggcttttctcggcagtgtgaaatcaacgactcgaagacacaatgtcttctccccatcacagctcagccttaacgagtaccggatttgcctaatactcagccttactgcttagacgtgcaatccaatcgcacgcttcgcctatcctactgcgtccccccatcgattaaaacgattataggtggtacaggaatatcaacctgttatccatcgcctacgcctgtcggcctcagcttaggacccgactaacccagagcggacgagccttcctctggaaaccttagtcaatcggtggacgggattctcacccgtctttcgctactcacaccggcattctcacttctaagcgctccacatgtccttacgatcatgcttcaacgcccttagaacgctctcctaccattgtccaaaggacaatccacagcttcggtaatatgtttagccccggtacattttcggcgcagtgtcactcgactagtgagctattacgcactctttaaatgatggctgcttctaagccaacatcctagttgtctgggcaacgccacatccttttccacttaacatatattttgggaccttagctggtggtctgggctgtttccctttcgaacacggaccttatcacccatgttctgactcccaagttaaattaattggcattcggagtttgtctgaattcggtaacccgagaggggcccctcgtccaaacagtgctctacctccaataatcatcacttgaggctagccctaaagctatttcggagagaaccagctatctccaggttcgattggaatttctccgctaccctcagttcatccgctcacttttcaacgtaagtcggttcggtcctccattcagtgttacctgaacttcaacctgaccaagggtagatcacctggtttcgggtctacgaccaaatactaaacgccctattcagactcgctttcgctacggctccacatttactgcttaaccttgcatcaaatcgtaactcgccggttcattctacaaaaggcacgccatcacccattaacgggctctgactacttgtaagcacacggtttcaggttctatttcactccccttccggggtgcttttcacctttccctcacggtactggttcactatcggtcactagagagtatttagccttaggagatggtcctcccagattccgacggaatttcacgtgctccgtcgtactcaggatccactcaagagagacaacattttcgactacaggattatcaccttctttgattcatctttccagatgattcgtctaatgtcgtcctttgtaactccgtatagagtgtcctacaaccccaacaagcaagcttgttggtttgggctcttcccgtttcgctcgccgctactaagggaatcgaattttctttctcttcctccgggtactaagatgtttcagttctccgggtgtgccttctgatatgctatgtattcacatatcgataacatgacataactcatgctgggtttccccattcggaaatctctggatcaaagcttacttacagctccccaaagcatatcgtcgttagtaacgtccttcatcggcttctagtgccaaggcatccaccgtgcgcccttaataacttaatctatgtttccatcctacaggaaacgcgttattaatcttgtgagtgttctttcgaacactagcgattatttcttatgaattcaagcttatttaaaactctttattcactcggttttgcttggtaaaatctatattttacttacttatctagttttcaatgtacaatttctttttagtcaagcgctcgcatactgctttattttcaaaaaatcaaatgctcatttacaaaagtaaactccgctttaatttttcttaatgcattgtctgacaaccgctttctttaaaaagaatagattgtcaagcgctcgcataagcaatatcactttaaccaaaaaatatttgaatgttaaataaacattcaaaactgaatacaatatgtcacattattccgcatcttctgaagaagatgttccgaatatatccttagaaaggaggtgatccagccgcaccttccgatacggctaccttgttacgacttcaccccaatcatttgtcccaccttcgacggctagctcctaaaaggttactccaccggcttcgggtgttacaaactctcgtggtgtgacgggcggtgtgtacaagacccgggaacgtattcaccgtagcatgctgatctacgattactagcgattccagcttcatgtagtcgagttgcagactacaatccgaactgagaacaactttatgggatttgcttgacctcgcggtttcgctgccctttgtattgtccattgtagcacgtgtgtagcccaaatcataaggggcatgatgatttgacgtcatccccaccttcctccggtttgtcaccggcagtcaacttagagtgcccaacttaatgatggcaactaagcttaagggttgcgctcgttgcgggacttaacccaacatctcacgacacgagctgacgacaaccatgcaccacctgtcactttgtcccccgaaggggaaagctctatctctagagttgtcaaaggatgtcaagatttggtaaggttcttcgcgttgcttcgaattaaaccacatgctccaccgcttgtgcgggtccccgtcaattcctttgagtttcaaccttgcggtcgtactccccaggcggagtgcttaatgcgttagctgcagcactaaggggcggaaaccccctaacacttagcactcatcgtttacggcgtggactaccagggtatctaatcctgtttgatccccacgctttcgcacatcagcgtcagttacagaccagaaagtcgccttcgccactggtgttcctccatatctctgcgcatttcaccgctacacatggaattccactttcctcttctgcactcaagttttccagtttccaatgaccctccacggttgagccgtgggctttcacatcagacttaaaaaaccgcctacgcgcgctttacgcccaataattccggataacgcttgccacctacgtattaccgcggctgctggcacgtagttagccgtggctttctgattaggtaccgtcaagatgtgcacagttacttacacatatgttcttccctaataacagagttttacgatccgaagaccttcatcactcacgcggcgttgctccgtcaggctttcgcccattgcggaagattccctactgctgcctcccgtaggagtctggaccgtgtctcagttccagtgtggccgatcaccctctcaggtcggctatgcatcgttgccttggtaagccgttaccttaccaactagctaatgcagcgcggatccatctataagtgacagtaagaccgtctttcacttttgaaccatgcggttcaaaatattatccggtattagctccggtttcccgaagttatcccagtcttataggtaggttatccacgtgttactcacccgtccgccgctaacatcagagaagcaagcttctcgtccgttcgctcgacttgcatgtattaggcacgccgccagcgttcatcctgagccaggatcaaactctccataaaaattatgatgtttgattagctcataaatactaaataatgtttgtaacttatagttacgttttttggaattaacgttgacatattgtcattcagttttcaatgttcattaatgttcaatctcttttattctacttcatttatttcttgaagtcaataactttttgaacgattactttatttattctatattgtttttatagttatttcaatggtaagttttacacttttgaaattcttctttaaaaacaactgcgtcgtttttgacgactttatcatattatcaactttggaatttaaagtcaataacttttttaaaactttttgtgttcacaacccgcttctttttcaacgcgtttattgcttaacacaagaacttattttaccagcattccaaaacaaatcaacataaaaacgtacaaaataaaagtaattttgtacgtttagcatatattatacctatttatttgtagcagctataactttttgtgcaatcgagctataaattttacctagacgatcatctgattgatatattgacggtgcaaaatcttttggattccaagatggttgctctaaaggtaattccccaagtaattgagtattaagttcatcagctaacttagtaccgccacctttgccaaagacatattctttattacccgtctctttactttcaaaataactcatgttttcaattacgccaagaatagaatgatccgtatgttttgccatcgcacctgcgcgagctgcaacaaatgctgctgtaggatgaggtgtcgttacaataatttccttacttgaaggtaacatcgtatgaacatctaaagctacatctcctgttccaggtggaagatcgagtattaaatattcaatgtctccccatttaacttctgtaaagaaattcgtcaacattttacctaacattggccctctccatataactggcgcattttcttccacaaaaaaggccattgatataactttaacgccatgacgttcaactggaattacttccttccctttaattccaggcttttcatcaatacccatcatatctggtacactaaatccatatatatcggcatctactaatccgacttttttcccttcacgagctaaggcaacggctaaatttactgcaacagtagatttaccgacaccacctttaccggaggctattgcaataaattcgactggattattttgagataataggccttctatcgttttaggtttattttcttcttttggtttaaattgatttactttttcttccggcaatgtttcaaatcgtataccgaccgttttcgcaccgttttcttttaatgcattaacaacagccatctgtaaatctaattgcggtgcaccacctaattgtgccattgctaatttaacactcacatgttctttttcttccttaatagaaacttcaacaataccttctgtttcttttaaaggcacatctataataggatctttaatttctcctaccaattctttcacttgatctaccgttaacaaagcaaatcccccttaatcattttaagacatctacatcatagcaaataacaatttttgcttagtctatcactaaaagtataaaactttttattaaataaaaaaagcagttagcctattattttaaatagaccaactactataattattttaaaatttccttctattactttctatttctttaggttctcttataaaaagtgctatcacataagctgccataacaagcacagctacaaaagcaaatgagatatccacccctatagcaatggattgctgtttaatttcagttgcagttaaatgcgatggcgatgtagataaaaatatttttgcaccaaaactcattaatgtaaccattaaagctgtgcctagtgaaccagccattacacgaccaaagttcataatagccgtgccatgtgagatttcttcatttctcaaagaattaattcctgtagtatttatcggcatcatgagtaaagaaactgaaaacattctaattgcatatacgactattaaatacgtataagatgtgtctgtatgcaagaaacacaacataattgtagtaattgttaaaattgtaaaaccagtataaatcaatggtctaggaccatacttatcataaaatttacctgtaaaaactgacataataccatttattattgcaccaggcatgataacaagtcctgataacaaggcagataaagataaactgttttgaacatatagcggtataagcagcgcaggtccaaccattgacatcattataatcattgaactaatcgtacataatgcaaatgttctatttttaaaaacccttaaatttaaaagtgcattagtaatattaaattgtctacgtataaataaatagataataaccatacttattatcaacgcacctattactattggacttgtaaatcctaaatctcctgcactactaaatgcgtatagcattaacccgaatccaatagttgaatacattactgagcgcttatctaatttcgtatatttcacttcattgtaacttgagattgaaactaagccgaaaacaaaggcaactaaagcaattcctacaattataataaatggtactcgccaactcgcttgatcaataattaatcctgtaactgtagggcctattgctggtgcaaattgaattactaaacctgctagtcccattgcaaaacctcgatgttctttactgaacaatgtaaataacgtaaattgcattaagggcataagtacgcctgcacccatcgcttgaattacacgtgctaacattaaaactccaaaattcggagctaaggctgcaacaatagaacctaataaaaatgtccccatcgccgctaagtataaaggtctagttttaattctatccattagatatgccgtcaaaggtatcatgacgccattaacaagcataaacccagtaactagccattgcgatgtactttcattaatatttaattctctcattatactaggtaacgctgtatttaataatgtttgatttaaaatagctacaaacgcactaatcaacataacagcaactatgaagtttcgtctccgggttgttaattcaactttagccatcataattcctcctttttaaaacagatatacacttgtccctttaatacatatagccattaacataatgggagtagtactcaaatgataaagaagcactacataataaatcattattggttcttacacattaggcacagctaatgtgtacttaaaaaactaacaatataacattgtagggcctaataatttattttatttctcagactcatacaatggttatttaacttatttaccacaaattgagcactaagactcactattatcgattcttctattgaacaaaaagaagttggaacacatatgtgccctcaacttcagatatctattttctattatttaaatttttactttcagggtaaaattgaagcttacaaacatataagaaccctataataaccatgatgacccaaaaatcgatattgatatacacatagttcagatgaataataaaataaaataacgttgttgcaactgtgtaagaaatcaaatgaaaagtcgcgcctctaaaatatgcattttcaggcaacatttttctaaaataatccattaaatgctcgactgcaaatatgatgaagtacccaaagattatataactgccataatataataggttatcgtacatacttctattatatgtaaagtcacccaacctaaaataaataagtattctacttaatccatataaaccaaaccctagaaatgttaaaaaaatcgcaccagaaagtacaaaaataaagagaacaaccattgtagttaacaagttataaaacttatgtttaagataattcacaatcattggcctccttattaataaaatattgaacgatttatctagtatctaggaaatttattatttcttactttaattacactacatcaattttaatcataattctattcttttgattgagatgactgttctttaaaaaatacgacccataaaacaataagcccaatgctaattacagcaacagcacttaacacattatgtaagtttggaccaaagattcctgattgtatcgcataaagatatcccattattgttgaacctattgatgccccaagatttttagttaatccataaaatgacatcattttcttcatttgtaatgggctagtttcctcttggacaattacactatctttcgtataaatatatccaaaacttaatcctgccaaaatcaacacaaatgctataagtaccggcaatttaataccaaatgaaatgataatactacttactagtagcaatgtaaatgatagtaagtaaataactttccttgatagttttgcttcaattcgatgtaaattaaaattcaatgtaatccaagctaaagataaaggaaaaataaccaatccactttgcaatggagataatcctagttgttcttgaaggtagactggaatatataaattgaatcccattaaacaaatagctgttagaaggtcagttataaaaactaaagtaatcgaacgattaaattcaaccacaggtaaaaatggtgaagaaacatgtttttctactttaaataaacacattgccacaacgatagctaagataaaactcaagaaatttaaaagtaacagctgttggtttaataaagcaaacataatcaatccaataaatacataaaatagcgtgagccctttagtatcaaattttgatttagcaactgtttcttcctctggaaaatgaaatgtccatataactaatataatggcaatgatcgcaatcggtatatttatgtagaataaccaatgccatgttgcaaattctaatataccaccacctagaagtggcccaatgatactcgaaataccccaaacactgccaactatgcccataattttatatcgtaacggaatttcaaatgctaactttggaacaatttgcgataatgacatcaatacacctgatccaaaaccttgtatcacgcgtgatataattagcatagtaaaattagtacttaaaccacacataaaactacctatactaaataaaagtaatcctgcaattgccacataaataattttaaatctcgaaagtaattcgcccactataggattggcaattactaatgcgataaaatacgctgtgaaaattaatgaaattaaatttcctgcatttaaatcttgtttaattgtaggtaatgcaagcgaaataatagatgattcaatcgctgacataaacataattaatattaaagctataacagttatgattgactttaatcgcatgaaatacctccttctatatatttatttataagattttatttacaaataattggttttcatatgtataaacacttttgactttcaaatcttaacgataattctattacaatacaatcccctattagaatgatttatgtaataaaaaaagcggagtttcccccagcttttctaaacgactacataaaatataagattgcaattaaatgcaatagtgatgctattacaataaaaatatgccaaatcatatgaaaatatggtctattcttttgtgcataaaaccatgcaccaattgtataagacacaccacctaagaaaatgaataatatgaatatccatgatgtgcgaataaaaataattggtaacaagataatacctacccagcccatcactaaatagacaattaagcttaacttttggttaactttgacagctatggatttatataaaataccccaaagtgttgttccccataataaaataaatactgtccaacctatccaaccacctacaactgttaacaaaataggcgtatatgtaccagaaattgctacgtaaatcatactgtggtcgataatccttaaaatatatttatgaggtgtttcattttgcatagaatgataaatagtagatgaaataaacatcataaagatagaaataacataaatagacatactcacagacgcaagcgtaccatgtgcaatataactgtgcacagccgcatagggtaacactaataatgttaacaaagctgcaacaccatgagatgccgcattaccaatttcttctccaaatgataaagggatgatatccttaaatgtttctacgattgtgtcattactttttttagttgatttggacatcatagtcaccgcctatcattaaattaaacccattctacgtaaatcttctgttgcagttgcaacactatctttaccttctttatttttaagaggtgaaaattcttcttctctaggaacttgtaacgtgacaaaactagttccataagtaaatatgtcaaaatagaacaattcgaattttaaagttggttgttcaataaccccaaagttctcatctaattgtttcaaattcttaatagctaaatgataaggtaactcacgatttacagcgtttaaaataaaaccaagtttaaatgcatgaataccgatattagcattgttaaattgatttgcaacttctggatctaattctgaatactccagtactgtatctttacaatcgacattaactaaacgtccaacactttctcctggttttggttgaatcgttttagaagtaatatcgtaatcatgttctaccgtaaatcctgcaaatagtggatccaacacttttactaaaacattgtcgatattattcaagaaaatatacttaacgccattattagacatttcttctaagtatcctgccttgtctaaagatttaaacacgccaccattaccattcggcgtttccataatacgaccctgttgatttaaaattaacttcccttcttcactaagcgccacaatattatcttgtttaaagaaatggattgcttcttgatcatatccaaaataactatgtgcttcgaaataagctaaagtttcttcatgattgatatcacttgtcataatataccattgaatcgtatgtccagattgatgattcaatgtttttaattggttagcttgaagttcaaataaacttacaccttcaatttcaaacgaacctttagggcccttgtaaccaagtcttgttccttgaccacctgccatcaaaagtactgcaaattgtccttctttaatagcttgaagtccttgttcctctaaacgcttaatctcatcatcactcatttgtgatttaatatcatatttcacttcagaaactgcagatacatcatctattgttttcttattgatgtataaatcgttatataatttggcaataaaatctaaatctaatgacgctaccttctcttcaagtgcttctttttcattgttactcattattttttcatattcacacaaatgatcttgtttatatttagctaattgatttttatctagcattttatgcctcctgctgagtttgtaacctttaataatttattttctataaaaacttagtattccagttgcttattatatcattgatgaaaggctgaaataaaacataaactgttccgaccattaacgctgtagctaaagataagtctacaagtccacctgttttaaattgaatcggtgtcttcacattaaacggtaacggataaaataatttcacgcctcttggtgttatcatatctagtataacatgtgacactaacccaattataattgctgccatataataattaggcgtctgaataatttgcaataaaaatgctatgattgcgataaataatattgaatgcgtaaaggttcgatgtccaaagatcaatctcacaaaaaaactaattaccttaaaccttctgccaatcttactttgagtgtgacatatatcgggtaataagctagctagagttgctagaatgataaccgtaaccgacgaaaaaatatccgtttgaaaatattgtgttgttagcgctccaacgagcatgccgcatgaagcatgtgttttacctgtcatatttgttctcctttaatactcacattttaccacatccctaacaaaaacacgaacatattttcgggttaaaattcattagtatgacacaatttaaaaaagtatcacataactcttgaaaacgattacaaaatcgtttatgatgtatttacaaaatatttaaaggatgtgtttgaataatggcaatgacagtaaagaaagataataatgaagtgcgtattcaatggagagttgctgatatcaaaattcctacaagtgaaattaaaaatattacacaagaccaagatattcatgcagttcctaaattagacagcaaagatgtatctagaatcggctcaacgtttggtaaaacgaatcgcgttattatcgatactgaagaccacgaatacattatttatactcaaaatgatcaaaaagtttacaatgaattaactaaataaattgtataaaaaaatcattcatggtgagggcttcatgaatgatttttttaattgattcaacacccagcaaaaacaaatacaaaaggacaactgttctcataattttaacagttgtcctttttcacatatatttataacaaaagatgtgccatcaaagaaataattggtagtgtaatgattgttctaatcaagaaaatcataaacaatttgccgatacttacaggaatcttcgaaccaagtatgacgccacctacttcagacaagtatattaactgcgatatactaagtgccccaataacaaaacgagttatatcattttgtacaccttcaattaatatagaaggtaaaaacatatcggcaaaaccgataataatcgtttgagaagcctgtgccgcttcaggtatttgcattaactctaaaaatggaacaaaaggtttacccaatatgacaaaaaagggcgtgtagttcgcaataatggtagcaatagtaccaatactcatcactacaggcaaaataacaaaccacatatcaatgactgtttttaatcctgacttaaaaaagtcaataacgcccggtgctttaataccaacttctgttgcagtatcaaagccatgtctcaatgccgtctttccttctggcaatgcctcagtacgcgcactttcaggtacctccttagcatactcatcaggaattttatttaaaggccaaattcttggcataatgactgctgcaacgaggcaggatactatcactgataaatagaaagcaaaaaattgattttgcatgtgcactgtttcagcaactacaattgcaaaggtgatagaaactacactaaatgtcgttgaaataactgttgcctcacgacgagaataatatccttcaccatattgtctacttgtaattaagaccccaacagttccgtctccaataaatgatgctaaattatctaccgtcgaacgtcctggcaatgtaaataaaggtctcataaccggtctaaaaataggacccaacatctctaacaaaccgtattccattaatagcggtaaaaatagagctgcaaataagaatactgccactaatgttggcaataaacttgagaacaataatccacccgtttcatctgagtaaataacctttgaaccaattcgtaaaaatgtcatccatgcaaaaacaactgctaatattcgtaaaattaaccaaccaattctaacgttaaaagcattgttcattagcccgtcaggtttcaatttatcttttaaaatagttgaacaaatcagagttatgatacccgataaagtaattatcgtcacaattaaaaatggcattacgccacctaatacatctttaagcacgcctgctaaaaatgccacgggcaacgttgtttgcttctgtccatcttgttcgactggaattggcactaaaaataataagataccaattaaagacatcgtaataaacttaagtctcccaataactatctctttccttgaaaagctatccataaaatcaatccatttctctatgtattcgttttaagtatatacagaattctattcagttaacaaacatattccttatcattctatctttcaaaatgtttatgtatgcaaaataatgaataattacagttattaaatatacgctatttcttgtaatttttcaagatgaattcaaaaaaggttaagtacaattactgatttcgtacttaaccttttttaaactctaatcatatgttagttatttcattcttcgtaataatattaagaagtatggtgcaccgataattgcaatgataaccccaacaggaatatccagtggcggatgaatgccacgggctaaaccatctccaaatgttaacaatatagcaccaattaaccccgacatgataataacgtgtaatgttttatttcctattaattgtctcgcaatatgaggtgcaattaatcctaaaaagctaataccaccgacaactgaaattgcggatcctgctaatattactgctaaaattaacaatagcattttaatagttttaacttttaaaccgagtgcggttgcaacagcatcacctagattcaatacatctaattgataactcaataaaatgatgattggtatcgttattaaaaaccaaggtaatatagtataaatattcgacatatcatgtccatatagactacctgtcaaccaaacaagcgctttgtttgcttccagtggatttctgattaataagaactgcacaatcgccgtacatattgcgcctattgctaaaccaattaaggcaagctttgaacctttaacatcatattttgaaattaaaaatgataaaaataaacttactgcaaaggcacctaagaatgaacctataggtaatacaaacaatggtgctgttggaaaggtcataataataatcacagcagctaaactggcacctttagaaatacctataacatcaggtgaggctaacgggtttcttattacagcttgtataattgcacctgaaatagccaagctactgccgataataataccaagtaatgttctaggtatacgatactcatttaaaataaaatcatcttgtgtaaagattcccttaatagcatcaatcggatgaatcatgacagaccctacacataaacttatgaatatactcacaattaaaaggattgtgattaaactataacgacgtataattttcgttgtcatcatattcttttcacccctttaatcgttataaataagaagtaaagtgcacctacgaatgatgtaacaatccctactggtgattcataaggatatgtaattaaacgacttaatacatctgatagtagtaacaaatctgcacctataataaatgttaatggaatcatgactaaataattcttactcacatagcgtttgactatatgcggtacgattaagccaacaaagccaattggtcctgccactgataccgacatacctgtaagaataatgactaatagtccaatgataattctaactttatttatattttgacctaatcccttagcaatgtcatcgcctagttccattatcgttagttgacgtccaataaaaatcgttacaattaaagcaccaataagccatggtagaatggttaaaatttcatcccacttcatactggataatgaaccgacaagccaaaacatcacttgttcgtttgaattctcattcaaaataataataccttcggtcatactactaaaaaacaaatggatggccataccagccaatgctaatttaatgggtgtcatacctttcgtagcacctgaaagtgtataaacagttaaaccacctataaatgcacctatcacacctaaatataatgcataatattctaatgatggaatgataatcgtcacaaatacaatgaaaaaagatgcaccagaactgacaccaaaaattttaggtgatgctagcggattgcgtgtcattgcttgcattaacaaaccagataccgctaatgcaccgccaataaataaccctgcaatcatccttggcatacgtacattatgcaataaaaacgttgctttcgtatctgtatgaccagtaacatagtgaacgatatcgctaaaattaattttcgaagaaccaatcgccatatttaaatatatacaaataaaaagaaagcacaaactcactatatacgtgagtgttgtgcgtctttttcttttatgatctatggcagattggctacttatttcttttatagccatttacttccaccttacttttgttctttttttgataattcaacaagttctttagccatttcttcagaagaaattaagccacgagatcttgcccaaacatcacggtcaacaatatccacgcgattatttttaactgcattcaattttttccatgttgcatcttcttgtaatttcttgaattcagcagaatcttttttagcgtgatcagtcataatgatcatacgctctggatttaaatcagctaaatgttcagtgtctaattgtaagtaaggtcctttcaaatatttacttaaaccttttgttacatcgtcacttaatgcatttttaaatcctagttcgtttaaaaattgtccaacatatgaatagtttggatgtgctaataaaccagctttagcaactactgctggaagcactttttgatttctatcaaatttaatttcatctttatacttattgattaatttatcatgctcagcaagacgtttttcgccttctttttctttatttaaagctttagcaattgttttgaacgaattaatgttttgtttgtagtctccatcaaaactctttaatgataatgttggtgcaattttgtttaattctttattaatacctttatgtctactgctatcagcgataattaaatccggttttaatttactaatttcttctaagtttggctgtttacgtgtacctacagaagtataatccccaattttttctctaactggtttaatgatacgttttttcttaccatcatcagcaataccaactggattaacgtctaatgctgctaatgcatctgcaaatgagtactctaatacaacgatacgttttgcatctttaggtacttttactgtaccattttcatcttttaccgaaatagtatctttagttgatgattcttttttacttgaattatccgtattaccacaagctgcaactaaaagtaaggcaactattaatcccaatatactaaaagtttttagacctctcatcgttccactccttaatatgtataacttcatttattattttattgataacaattatcattgtcaagtagcgttcaatcttttttatattactaaaatgtatgactatatatttcctctagtaattatgactacaattagcacatttccttagaaaaaatattgataatgtatcattgctatatcatctttgcattaatacaattgacaccatttagtatgaccgttatccctgtaattcagctgatattatctgttgcaattttatgtgacgaactgttgcacttaatttgataaatcaacaaatacaaaaaatctaagttgaacaattatgatacaaccgtgcaaacgatatgtagtataacttgtcaacttagacttattgataaatatattaatattggtttaccatagcaggagatttcacatcaaaattttgaagtagcgtatcaatctttgaatcatcaatatataccttatgtaaatttttcatatacatcgaatgagaaagtgcttcataatttaatgaaaaagatatatgatctccaacttgatagtgtccttgaccatttaaatcaagcattaaatgatcactcgaagcgcctaaaatattgatatgctgatccataggtgaaatattatcgacttttgtatctaaataaccaatatctacaatagcttgtaagaatgattcatgcgtttgtgtattaactcgaggtttaatttctaaaatctcagcctccaatgtaatcgcatcttgatataacatagctatcgcttgatttgtcgttgtatcaacacctctaaacaacgtttcacctattcgcaattcatttattttacccaaatcattatataaaagttgtggtaacatgctcgaattaccacctgaaataattttcaatcgatatcctatttctctttcaacagctgagacgaatcgattaatcataaagatatcatcatcacttggtgcatcagatttaaaacacataaaattgaatgctaaacctacaaaatggatatttttcaagtgaataatctctttaatataatctaaaacatcataagtcagaacaccttcacggccatctttccaatctaccattaataaaatcttatgtttttttcctaaaacttctgctacttcatttatttgatgtatggtagataattctgtttggatactcatatcaactttttctatcatatctgaaatctcttttttggcaggcgtacgcaataacgtatatgttaaatcctgatctgcaatactaattatgttatccaatctggattctgcaacatgattgatacctaacgcttttaagctttctacaattgtacggtcaccagctatgcacttaattactggtgtgaattgcatatttttactttgaaaaactgtttgaagtactttggcgttatatttaatcttcgatatatttatgttaacgtgtgccatgtagtactacacctctttttttatcggattatctaactcaatatttaaatattgctttactttattttccattctcatatttaacaacgctttgacagtaattgttggtccaaacaaaatatcttttaactcatttgcatgtggtagtgttgggttaatggcatgcgctactacttgctgtactatgttaaataattcggcttcttcaacacaatcatactgattaaaatgatggattaattctgccatttgattttgaataacagcatgttggaattttgcaatcactgcatctatagaatcagctattaaactatcatttgtaattttaatatctgatacacgatgttgtaatgtttctaaatcaattctagaaccacctaaatctctcactaaaaattgaatgtcaaaatgtggccccaagttcactactgtattttgcatgtgtgcttctaatgcaattccataattttgaataaaagcaattaaaggcgggattaatgcttgagagtatcgttcaataaatgtcgtaatactttctttagtaattccttgatttaaccactctaagtaactatccacgataactttttgatctattggatttttattaactagacttgcactaactactgttgcaccttttccatcaatttcaggcttttgtcttatgatacaagcaagctgacgtgccctatctttatcaacatttgcatattcaccgaacggttccatagcaactttaaatcctggatattgattcaacatgttttgtaaagcataacttaactttggtccatctacagtagtcacagttgagactgttctaacggcacttgttgcttgtgcatcgacgggcaacttaacatgatatggtttatcaattaaagacatcgtcctgaatgataaagttgcttttgaaagtattgtaaacggcgttggaattaatatttttttagcaatccatgcttcaaaatatttccctatcgtatgatcatattgccaaggatgtactaaaatcgctctatagtcttcacttttcaaacctaaactcttcaaaaacacacgaatctgattgtagtattcaggaattatttcatcaataataaattgatcattaccatccatagctgtgcacacaacatggtctttttcaatcatcataatttgcaaagggatttctttttcaaactcaggtgcatatgctcgtacttcttccatagttaagggcaatttcgttttggttaaagggtgtgttggatgcccctctggtaccaaactctcagaataagttaaatcatctgtcttatcactatcttttacatgttgtaaccatgaaaaaaagttaatatcttgtggtaatcttgaaaatttaaaactttgacttattaacgtttgtctgtgagacatttgcttatatgtttcaactaaactatctcgactgtgtattaactcttcgcgtagtcgctctgaaatagggatatcaaagtcatgattcaacacatctaataaaccttctaaagttataattaatgacgtttcacctttatttaaataagtaatatcacctgtaaactcgtagcgttctaatgcactttttctaacaatttcaatagtcaacacatgcatatgatactgaatttcaattaaagatcctttttgcgaaataaatgtttgctcggggtaaatacgttctttaataatggcgttaattacacgatattgaatatttctatctgcctttgcccattcaagatataccatgattactttcctccaactttaacttcaactttctatttataaaatagaataccattgtaatgcatatagtacttattcccattattgaaaaagttctaacaatgccaaacacatctgcacatatactcattaacagacttcccaatggaatcatacctctatccatcataataatactcagtactttaccacgttcataatctttaacattattttgaaaataaacgcgatttgtcgtacgtgcccattgactaaataacccaatcaatgtaatacaaatgaacatgatgacaatattgtgaaataccacacctaacaaagcaatgccaaataaaagtgaacttaaataatacatatttaccataccaatatatttaagtactctaggtaaaactagcgttgcaataataccaccaatggcacacatcgtcatagcgataccaaatatttcagatttccccggaaatactttgtttgtcaaaactggtaaaagtgtcgtatatgaaaaacctgtcgccataatcaataatgatgttataaatatttgtcgaccttccatatgtaatttgaagtaatctataataacttttaacggcatgtatcttgttgcatcttcaggtattttagttactttaaaatgtaatggtaaacataataaaactgcgataaaataacaaattgcctgtgcaagaaatgttgttggcgcatgatagactgctaatatgacaccagcaatggcaggccctattgaacgacaaatattaatgatgaatgaatgaaatgatacagcttgtgtagtagatattttatctgataaatctggtaagattgcttgtcttaaaggtgtttcaacagcacttaaaattcctcttaatgtcgcatatataataatgacgctaattggaattgcagtgaaactatacgtgagcacacataaaattgcagttactaaaaatgatgatgaaattgtaattctcagcaatcgccctttatcatatttatcggcaattgcccctgcccacacacttagtaataatattggtacaagtctgcaaaaattgacaatccccagataaactgcgttatgataagtggtaagtacaaaccaatttagccctatttgtccaatccaattacctagaaatagtagaaaagaactgctaaaaaaatattttgtcataaaacttacacccgcattctgttgataataagaatcattatcattaatatggattatacaaatctatcttgcttttgtaaaatatttcatagaggtgaattatgaacttgaacttaatttttaaagaacagacattaaaatttaacaaagaagaacaagaaacatatttatttttacaacaacataatagcgattgggctaatatttttaaagagatgattttacaaggaagagataaagtcactcagagattagtcacatcaatgcatcgcgaaaacttagttaaagcgcgcactcaaagtaagaaaatattgagtcgtgatttgattatgttagatatctcaacgactcatatactagaaatccagttcccacaagctaagcaaacattatatgctcctatcactggagaacacgcctttgatcgaattgatgttgaaggccctttctacattaaagatgacattacaaatacgattacacgagtacaccatccaaatgaaattcttgagtgtattttaattgaagcaccagatttaaaaaatgctgctagtgatcaatttcagcaagatttaataaacagtgcaactaatatgacatttgcaattagctatcaagcactgtcaatgcaacatgattctgcacctttatttaatattatcgaaaatagcgaagatagttacttgcgttcagagcaagccgttattgaaggtcatccgctacatcctggggctaaattacgtaaaggtttaaatgcattacaaacattcctatattcttcagaattcaatcaacctattaagttgaaaatagtactgattcacagtaaattaggccggactatgtcactgtctaaagattatgatacaactgttcatcaactatttccggaattaattaaacaattagaaaatgaatttacgccaaagtttaactttaatgattatcacattatgattgttcatccatggcaattagatgacgtattacattctgattatcaagcagaagtagataaagaattaatcattgaagcaaaacatacgttggattattatgccggtttatctttcagaacattagttcctaaatacccagctatgtcgccacacatcaaattgtcgacaaacgttcatattacaggtgaaattcgtacattatcagaacaaacgacgcacaatggtccactaatgacacgtattttaaatgatattttggagaaagatgtcatatttaagtcctatgcatcaacaattattgatgaagttactggtattcatttttataatgagcaagacgaagtagactatcaaactgaacgaagtgaacaattaggtacattatttagaaaaaacatataccaaatgattccacaagaagtcacaccaatgattccttcaagcttagttgcaacctacccatttaacaatgaatcacctatcgtgacattgattaaacgttatcaatcagctgcatcattgtctaattttgaatcatcggcgaaatcgtggattgaaacttatagtaaagcattgcttggtctcgtaatcccactagttactaaatatggcattgcattagaggctcacttgcaaaatgctattgcaacatttcggaaagatggtctattggacacgatgtatattagagactttgaaggtttaagaattgataaagtacaactaaatgaaatgggatacagtacatctcatttccatgaaaaatcaagaattcttactgattcaaaaacgtctgtgtttaacaaagccttttattctaccgttcaaaaccatttaggcgaattaattcttacaatctctaaagcatcaaatgattcaaacttagaaagacatatgtggtatatcgttcgtgatgtactagataacatttttgatcaacttgtactttcgacacacaaatctaatcaagtaaatgagaatcgcataaatgaaattaaagataccatgttcgcgccatttatagattataagtgtgttacaacaatgcgtcttgaagatgaggcacatcattatacttatattaaagttaataaccctttgtatcgagaaaataattaaggttatagaattttattaatcgtgagctcaaggattacattaacttattaaatacaatctatacaaatgagagaataatacattttccatattcaaattattaaaaatcacaaaaaagctcggcacttaaattgagtgccgagctttttatcgaataacttattgtaaaccttgtctttcttggttattgttttcattatttttttcgtgtttttgtttccattctttttgagtcattacatcgtcaacttgcatgttaacttcaacaacatctaaaccagtaatatatttaacttgttcttttactaattcagttactttacggaagattttaggtgctgattcaccatattctaaaattacttttaagtctacagcagcttgtttttcaccaacttcaacagatacaccttgagtaacgttatttccacttgagaatgcattagtgaatgtatcagttaagccacctttcatgtctaagatacctttaacttcacgtgcagcgataccagcaattttttcaacaacttcatcagagaatgttaatttatttttgaattgaggctcttgattttgttcttgttgtttttgacgctcttctctttctttttcgttaacaccagtttgattgtcgtatgcttgttttgctttattgttatctacagtcataatagattctccttttgcttgttaatttttatatttttttaattaaattctaaattgatgaattaactccatcgatttaaaaaattcataaaatcttgcttacggtctttcatatacccaatacctacaccaattaaacataaaacgatgataagtactgttttccaaaaacctaacgttaagaataatatcgcgattaatagaaacgctaggaaaccaacgattctccatttaaatacttttaaaaaattaatcacttgttgtgtagagtcttgtccgttttggttatgattgttagccatgatatacctcccttacaacactcgtggaccagaagttttctgatctctcacattaacttctaacttacgtactggcatttctgtgaaatattctacattctttttaatatccgaacgaattgcttcagttaaagattgaacttgaacattatttggtacgaaaaagtcagttttaatgtcgatataagatttattttttttgttatatagtttcgcaactacatttggttgtcttacttgatcatattttgcaaccgtatcgaatgccgtcttttcaacagctttacgagatacgtaaacatgaccatcatcgaagtctttgtataatccaggttttcgatgcgtaggtttgaagatactaaatactaatataagacctattaatatcaatagtgcagcaagtgaaataagtaatggttggaaccattcaaattgaaggaagtagtcttgatattcagttatacgtccatcttggatatacatgaataacaggaaccccacgattactactattaataagccaaggataaagtttttaagtcgtttcacccctaacgacacctccttagttaaagttaatttaaaaacatattaaatatgtacccatcagtttttttcttaaacataataaattaataactttaaatttatttttaatatataagatgaagtaccatttagtaatatattccctagtttttgtaaataaaacctcattattaattaattttcatcaatatgttttgaagaacggtattctaaaatatctgggtcacgatgtttaattaaaaccttattactatttctcggtttctcctcactcaaagattttaaaagcgaccatatcatcgctataatgaccacggaaaatggtaacgcagcaatgattaataaattttgtatcgcttgcgtaccacctgtgtaaatcataataattgcaaataatgccataatgataccccaactcactttgacaaatgacttcggattaatatcacctcttgaactcaacatacctaaaacataagttgccgaatccgctgatgtaacaaagaaaatcataataacaagtaaagtaattaagcttaatacaaaacctagtgggtaatgttgtagcgttgcaaaagttgctgtttctgtcgctgctttagcaatatcggcaatatgattatcttgtaagtaaattgctgacgcgccgaataccgcaaagaatataaagcaaactaatgccgggacaaaaagtacacctagaataaattctttaatcgtacgtccttttgacacacgtgcaataaatatacctacaaatggtgcccaagatatccaccatgcccagtaaaagattgtccaattttgtaaccattggaatttttgaccgcctgacggaatgcgtaaactcatactaaagaaatttgcaatataattacctagaccattcgtaaatgtatttaaaatgtatagcgttggcccaacaataaaaagaccaataagtactacaaaagcaagtaacatgttgatattactcaacgttttgatacctttatctatacctgaccatgctgaccaagtaaataatatggttgcaatgacaatcaagattacttgcatcgtgaaattactcggtacattaaataaaaaatgtaaaccttcgtttatttgcaatgcaccgaaacctaatgttgcagcaacgcctgttactgtagctatgactgccaatacatcaatggcaccacctaaaggtccacgcattgccttttcacctaataaaggcgtcaatgtagcgctgactaagccaggatatcctttatgaaagctaaaatatgcaaacacaagcgcgacaataccatagactgcccatgcatgaatcccccaatggaaaaatgaaaactgcattgcatcattaattgcagattgcgtgccagctttatgaataggcgttaatttgaaggcatgactgattggttctgccgttgtccagaacacaagtcctattcccataccagcactaaataacatagcaaaccaagacggcaatgagaattcaggatcttcgccttcttcacctaatgtaatgtttgcgtatctcgaaaataaaatatacacacagacaaataaaataactaaaacgagcaataaataataccaagaaaaatgtagcgcaataaatgtagtaatgttttgcgtgagtttttctaactgtttcggaaatattgctccaaaagcaacaaatatcgtacatatcactaaagatacccaaaacactagacttactgatttatttttcataaatacaaaccctttctgtgtaatggtaagttcatacccataactgcaacattttaatcatttataattttatatagacacaattaataatgcctcatcttttaaaaatgatatataaaacacactcaaattatttatcattgagcaacaaagtattttattgtatttaagtaatgcctttctaatgcattattgaattgatacctgcaaagttgccatatttccatttagaatcaatagtcgctagacacaaaaaataagtcgccctatacagtattttctgcataaggcgactttacttactaaactatatattaattactaattttccaatcattgattgtttttccaacaattgatgtgcttgatataagttttcaggtgataaaccttcaaaaacttgtgtcgttgttggttggtaatgccctgattctatatttttcgtaatatcttctaaatactcatgttgtttaatcatatcaggcgttcgatgaattggacgcgcaaacataaattcatgtgtaaatgttatactttttaattttagtgcatttaaatcttgatcttcattaaaagctacgatagttgtaatatgccctaatggttttatcagttcaatcatagtattgtaatacaagtctgtattataggtgcaaaatatataatctactaatggaatttctttttctttaaattgacgcactaaatcctctttatgattcaatacgatatctgcgcccatcttttcacaccactctgttgtttcttgtcgtgatgctgttgtaatgacagttaaaccataccgtttagcaatttgagtggctatactgcctacaccaccggcaccattaatgattaagacagacttcccttcgttttcagcaggattatgtgaaattttaaatgtatcaaaaaacgtttcatatgccgtaataccagttagcggtagactaaccgcttcattagcacttatgttgtgtggtgcttttgcaactatagcttctgacaccaattgatatgtcgcatttgatccttgtctatttggcgatccagcataaaatacaacgtcacccggactaaataatgtaacgtctggtccgatagcttcaacagtaccaatagcatcaaacccaagtacacgaggtgcttgagtgacttccatttgtcgttgctttgtatctacaggatttacactaatgctatttactttgactaagatatcatcattttctggcgttggctttctttgttcgtatactttaaataaatttccttcttccaatttaaagggcttttcaaatcctatcattttcatatcgtttcacctcatttatgaacttatttcttattatacaaaatagaagccatgtgtgcttatatcgcagcatcatgactcctttttcatttgaatatataaataattacagacgactttcgtattacattttagacttatttctaccatgttactgaacaaatttgctttagataaaaaattattaaattttagtcaattaacaaagttagtttgttaaaacgtatactttattattccgttactttaataacttgtttaccaaagttatcgccagtaaataaatttttaaatgcatgtggcgcattttcaaaaccatcttcaatggttacttgtgactgaattttaccttcttgaacccatgttgcaagctgttcactagcttctttaaaagcattagcgaattcacttaccaagaagcctctcatcattacttgcttcttaataagcgtaccttgaatacgtggtccgatatctgcttcaggatgattatatgacgaaattgcgccacatactggtacacgtgcaaaacgatttaaatgcttaaatacttcatcgccaactgttccaccaacattttcaaaataaacatcaataccatctggtactgcttgtgctaacgcttctgcaaaatcctctttcttataatcaataccagcgtcaaagcccagtgtccctgttaaataatttacttttttgtcgccacccgcaatacctactacacggcaacctttaatcttagcaatttgacctacaactgaacctacagcaccagatgcagctgaaaccacaacagtatcaccggctttaggttgtccaatatcaagcagaccatgatatgctgtttgtcctggcattcctaaaacacttaaatataaatcaagtggtacatctgtcgttggaactttagtaatttgatccgcttggacatgattaatgattcgccaaggcaacatacctacaacgacatctccttttttataatctgcgagtgtcgaatcaattacttttgcaacgacatggctaacaatcggtttaccaatttcaaaaggctgtacatacgaatctgccttagtcatacgtcctctcatatatggatccactgaaatatacagcgtttgtacaagtacgccatcgctctcaagtttaggcgtgtcagtctcttcaattttgaatgtatcctcttgaggcatgccttctggtattttgttaaaaagaatttgtttattttgcatcattaatcacctttctttatttgaaacttttacttatttgttacttaagcgttaagtttgaattgtgtcttcgtgatgtctgtatgcaaatacattcttagttgttatattttgacttaagcactgattcattcatgtaacttcaaccacattatatttgctataatcataaatttaaaatgttacgacttagacattttatggaaactctcaaacaatagataatttttgaaaagctctaatattacaagcttttttgcccccgaaaaactagcagttgctttattttttccataaaaagtcgattaactcattagcaacattttcattctcatgaagctgactatgttgtgcaggctcaccttcatatttagattctcgataacttttcggactatttcccagtaaatattttaatgatttcgaagaactattagacactctgccgtctgaatgtgtaccatctttcaaatctccataaatatttagcacttcgatacctttacctttataaatatcttttagcacgcgtaattgctgataaggttgattcattcgacttggtttaccatctttatcaactgtaatttcattgacatcttcattcatatttaaaacaccattaaatgtccctgcaatattcacttgtttgtttaactgtggcagtgacttgtcgttaccatatgtcatcatatattgtgcaaatgttaagttccccattgagtgaccgacaaagttgaatttatcgaaattgtattcagattgtaacttagtcagtacatttttaaaccacgcagcattcttatccaaatagccttgtctgttattttcaagttcaattttcacaataggattcactgcatcttttcttagtttccctttaaatgtcactgcaccatcctttgaaacgtaagcagtgatgatatctttagttacccctcttttttctgcttgcttcaccataaacttttcagaattggcactaccaccaaatccatgtaagaacaatgttggaattggctttttaacaaattgctgttgttgtattttaaatgtttgtgcctgtcgttgactaaacaccaccgtaataatagagcctataataatagcgaccgctaacaatgtcgtaataattacaaaaattttcttcacacttttaactcccattcatgtcttttatataagtataaaggatgtgattaaaaatgtcctttagttgattttgaatacatcattaacttttaagatgactttggaaagttgtccgttaacatttgttaattgattgcttctttagctttcaatggtgtgtcacccattgattaatatataaatatgtatatgcatgtttaatttatctctttttataaataaagacctaccagcactcgactgataggccttttaatatctataattatttaatttcttttgtttcggctaactctttgtaccaataagcacttttcttaggataacgttcttgagtctcaaaatcgacatagaataaaccatatcgtttttcataaccatttgaccaagagaacacatccattaatgaccaaataaagtaacctttaacatttgcaccatctttaatagcatctgcaataacgttcaaatgttgtcttacataatcaatacgtgcatcatcatgaactgttttttcagattcaataaattcatctttatatcctaaaccattttcagtgatataaatcttgtgatagttaggataatctttaacaacacgcatgatttgatcatataaaccttgaggatagatcatccagtcccagtctgtgcgaggtacgtcgacatcaaattcacgttgtccgacacctttaagttggtatttagaaccgcctttatcacctgtcgcattatgcgtgatttcagattctccatcgtaacctctcatccagtcactcatgtagtaattgatacctaagaagtcgtttaaatctttggctgcatctaaaatggcataatcttcatctgtaatatttaatttaccgccattaacagataagatatgttgcacaccttccatcgtttcacgagaatacttacctaaatatgttgcatctaagatgaatttattatggatgatatcttctaattctgctgcacgaacatcttcaggatttgatggatcgaacggatattttgttggcaatgcgtgtacaacaccaatttctccttgatagccgccatccttgaataatttcactgctcttgcatgagcaaccatcatattatgatgagattggaaaactttttcaaaatcatatttaatacctggagggaatttacctactaaatattggccatcaccaataggtccaatttcattgaatgtagtccaatattttacttctgggaattctttaaaacaatattcagcataatctacaaagtagtcaatcgttttacgatttagaaaatcgccatctttgtgtaacacttctggtgtatcaaaatgatgcaatgttacaaatggttcaacatgacgtttatgacactctgcaaataacttatggtaatactcaacacctttagggttaacttcgccatatccatttgggaagatacgtgaccatgcaattgaaatacggataccattaacaccgaatttttcacttaattctaaatccactggatatctgttataaaaatcactcgctggttctgcagtataccaatagttttcttccaaatacgtatcccatgctacacgacctttaccatccgtatttgtcgcaccttctgcttgatatgctgctgttgctccaccaaaaataaaatcttcaggtaatgttttagtcatatgaaaaactcctattcttaattttcaaattgttgttgaacgaaatcaagggctgcttggccgtctcgtgtcaatttgatatattcggcaccttgagtcttcgctaatttaatacctaatctatctgtatcttgcttaatatcttcatagttagacgcaacttgtggcgctaaaatgattaattggtactctttcataatgtccatatgtgcgccatatccgccagctgccgctttcactggcacatgatattcttcagctgctttattaagtgcattggctaataatccacttgtaccaccaccggcacaaagtactaagacatttgtttgttctgtgatatttgaagctttagctgcatcgtctgatacaccacttgccgctaaaattgaatcagcttttttcgtatcaaagtttgctgcaactttttcttttaaatctgaattactttctttacgtccttcttcttcatcaagaatttcactatcataaacttttaggaatgggtagtaaataataatatctacaacaatcaaagtaatagctagaacgaatgaccataaaccaaaacctgtacccatgataatgcccaatggacctggtgttgtccaaggtaaattcacactaaaactattcattcctaacacttcaacgaaaagtttgaaaatccatacgttaacaattggtgctaatacaaatggaataaagaacacaggattcaatactagtggtgcaccaaataaaattggttcgtttacaccaaagaatgttggtacaactgatgcacgtccaatcgctttgtttcgtttagatttcgtcatccacataaacatgaacgggacgaccaatgttgcacccgtacctccaaaagtaacgataaacatttgtgtacctgatgtaataattttatctgcgtgttctccagcttgaagcaacttgaagttcgcttcgatattcgcatatgtaatggctgcaattgctggctctactattgatggaccatgaattcctacaaaccagaataatgcaaaggcaccaaagataattgtgacaccaatccatccatctgctgctgtaaataatggttcgaataattttaaaataccttccgctacatttgatttaaagctgttgcgaatgactaaatctaatgcataaagaatgatgattaccgctgaaaatggaattaagtccttaaatacttgtgaaatattcggcggtacttctttcggcattttaattgtaatattgcgcttcacacagaagttataaacaataacagttacaaatgctgataaaaatgctgttaataaacctttagttcccataaatgcacttaagaatccaccatctttggctggatcagaagctaagaacaagaatccacacatcgctgctagcattgtagaaataaagttaatttgatttgtactttctagcttacggttaaatgaatctgttaaagatttcgctgtcgttcctgctactaaaaatgctacaagccccatcgtatagttatatggtttcattaaaatggcttccatgcctttatcccatttaaaaccaaatatatttggcacgtatgcaattaatagaaagatacttgagaataagatgacaggcattgcagaaataaatccatcacggatggctcttaaatatatgttacgtgataatttctcgaaaaatggcttccctttttcaatttgtgcgatcaatttttgcatcattgtcatcaccctcttttataaaattctaataaatgcttcattaaatctttcagtaaaattgttgtcattaaatggtcttgaccatgcatcatcgttacactgtatgcaatatcatcaccttgtgcttctttagctaacaggcttgtttgtgctctatgcgcttcagcaatgcaattgtttccttcttcaatcaatgcatctgcttttgcaaaatctccagcttgagctgctgtcaatgcttctaaaaacttagaacgtgcatcccctgcaaatgcaacaatttcaaaacctaataattggacttcttctctattcatagcattaatccccttttatacttattttctttgtttccaagatgtcgcagtatcttttaatactttatttaagtcatcaatatttttgaaaccagttgtacgtaaccattcacgagcagcatcttcaccttgttcaatgtatacttgaacagcaccagaccatgtagcacggccacaaagtacaccgttgaatttagcaccagcttcgtgagcaaattttaaagtttcttggaataattccgcagaaacaccagcacttaagtaaatgtatggtaaatgagttgctgcatcttgatttttaaagtgttgtgccgcttcctcttttgtataaaccacttcaccttcagcaaagccttctacatacttcatgtttactggtacttcaactttcaatacatcaacattaaagcgtggttctgagaataatttcattgcttcgttaacctttctaggcttaacttttgcgaattcaacactaccgttatcaggaatgttgtcatcgtatgttaatacttctaagaagaaaggaatgtcttctgcaacacattctgaaccgattctttcaatgtatgctttcttttgaatgttaatttcttcagcatcatcaacatcatagtaaagtaagaatttaacagcatttgcaccttgttcttttaaacgttttgcagaccactctactaaacagtcaggtaaacgacctttagcatttacgtcataaccagttttttcataagctagcaataatccacaatctttgttacgtgcatcagatgctggtaaaccgtattctggatctaataaaattgaagatgcatattgtgttaattcttccgcaactaatacttttaattgttcaatttgagctacagttggctcttcagtttgatgttttgccatcatgcgttttaaagcaccacgttggtcaaatgctaatgcagaaatgataccttcgttattacttagttgttcaattgatgcgattttttgattcgattttgacattttttacacctctaaaacttcaatttgattgaataaatcatcataattatttaaattgacataacctgtttgtgcttcttgcgcattcagcatgcctaaagtattggctttttttagtaaatcgtggtcgttttcatgattgagaattgctgaagtaattccagcaactgtagaatcacctgaaccaaccggatttaatacgcttattgtcggaatattcactctatagaatgtatgattgtgcttagcgaatgcaccttgtgcacctaaagacacaataatccactcaatcccttcgaataagggttgtgacactgcctgtttcaaactttctaaactttcatcaagtggctggttaagcaattgatatagttcagaaatgtttggtttaatgactgttggtttgtatggattttccaaaactgtttgcaaagttgcacccgagcagtccaatatcacaggcacacctttgttttggcatcgttcaataatttgtgcataataatcttgatttaatcctttaggtaagctacctgaaatagcaactgcttcaactttttctaataattgttcaaaatgtttaataaatcctgcagcctcttgattatcaatctccggtccctgctctaaaatttctgtttgttgcccttcatgtaaaattgcaatgcagtttcgtgtttcacccttaatgttataaaatgcatgcttgatgtcggcatgatctaattttttagcaataaattgacctaattcaccgccaataaaaccactcgcaaggactggctcgcctacttgcgcaagtactcttgttacatttaaacctttaccaccagctgttttacttacttcttgaacacgattaacatcatctaatttcaatgctgttaatggatatgaaatatcaacggatggatttaatgttaaagttaaaatcatatgtgtcgtcccttaatcgtggtattcgcctctgtcccatttttctaagaattcatcaaagaaatgtggatcagcttgatctgcattgcttgtttctaaatgtttaattttagcgattaattttttattctcttcagttggtttatattcagcgttaataaatgcatcgataatatcgcacattaataactcacctataatacgtccaccaaagccaataacgttcgcatttaattcttctttagcatataacgctgatgtcatatcacgtactagtgctgaacgaacgccaggtactttatttacagcattgttaataccaacacctgttccacaaatacaaacacctaagtctgcattaccgctaacaacttgttcgccaacttttttaccaaaaattggataatgtgttcttgtgaaatcgtatgttcctacgtcaatgacttcatgtccttttgattttaaaaattcagatacacgcatttttgtatctgtaacaatatggtcgcatcctaatgcaatcttcatagtaatttttcctccctagcacattttattaagcatatctacacggatttggtgtctaccaccatcgtatttaccttcaacaaaacctttaacgacatttttcgctaatgtgtctccaacaatttcagaccccatagtgatcattcttgaattgttatggcctctagtcatatatccagagcgttcatctgatacttcagcagcaatcatgcctttgatttttgtagcaaccataaagctacctgcaccaaatgcatcgataacaatacctaagttaccttcttgactttgaacatcttttgctacagccaaagttgcatcaacaaagtcaacttcctgtccttctgttacgtcaacaacatcatatttattgtctaataagtatgatttgatgacttcttttaatcgtttgccagcttcatctgaaccaataataatcgccataataagactcctttttactttaattttgaaatacctttcttaaaatatgacatgtttatttgtaggttatgaaaatcttgagaaaaggctttcaatttgattacgtttaaattataaacataaacaaacaataaatcaacataatatgtttataatctgtttgtttatgacatattttcaaacaataagtgaacattcatactgtggtgttgttttaattaggtattcgtctgaaattgtagtaaaactttgtcgaggttcccgtttacataaatttgcataaaaaatagcccataaatgaatgcaaattcacattcacttatgagcatatagatacatattttaacaatgcagttatacttttaatttagtcgactacttcaatatatgttttaatcgtttctactttttcttcatcttcatagtccatgaccactgcagtcaattcgtttaactgacaaaatgatgtaaaatcttctttgccaactttcgtatgatcgattaacaagtatttttcaattgaattacttagtgccaattgttgcgtataggcttcatctaatgtagatgtcatcacagcacctttatttactgcgttactactaaagaacatcttgctaaatcttagtttttctaacatggcattcgccatttcacctacaaacgcttctgtaatatggcgcatttcaccaccaattaaatagacacgaaaatgtgctgtttgtttttccaacaaaattttatacactggcaaacaattcgtaataattgtgagcgtatgatgattgacttcttccgctaatagttccactgttgttcccggtccgaaaaacaaagtatccccatcttcaattaatgatgcagcttttttagctataaatcgtttttctgcaatttgacgggtatgtttttctttatgcgatatttctttatactgaaatgttgaattactgcgtgcaccaccatgaatcttcgttaaaatccctttattttccaactcaattaaatctcttcgaactgtcatatcagacacatttaaaccttcgacgatttcattcgttcttatcgtgccctttttattcactagtttagcaatttcgtccaaacgttcatgtttattcaatgtaaaattgcctcctttatttaggcgatgggtcattatcctttatgtttagacatcaattttaatatacatgcttattctataataaaaattgcgtaaaaactaatataatttaactgttcgattatatgtataattcatttttaaaaagaactgtttaaactgcgcttttgataatcgtaaaatgaatatactataataaaagcaaaagacgttataaatcattcattattttgatggggtgtttattttgagaaatgatttagagacattaaaacatattatagatagttcgaatcgtattacatttttcacaggtgctggtgtatctgtcgcaagtggcgttccagatttccgttcaatgggtggcttatttgatgaaatttcaaaagatggactttcgccagaatacttgttaagccgtgattatttagaagatgatcctgaaggttttatcaatttctgccataagcgtttactatttgtcgatacgaagcctaatatcgttcatgattggattgcaaaattagaacgtaatcaacaatctttaggtgtcatcacgcaaaatatcgatggtttgcactcagacgctggaagtcaacatgttgatgaattacatggcacgttaaatcgtttttattgtaatgcatgtcataaatcttatacgaagtcagatgtcattgatagaactttgaaacattgtgataattgtggtggtgccattcgaccggacatcgtattatacggtgaaatgttagatcaacctaccatcatacggtcattaaataaaattgaacatgctgacacccttgttgtactaggttcatcactcgttgtacaacctgccgcaggattaatatcaaattttaaaggcgacaatttaattattatcaataaagatcgaacaccttatgatagagacgctactttggtcatacatgacgacatggtttccgttgtaaaatcattaatgacagagtaatcagtaggtaaaaagcatttcccgagtaacagggagatgcttttaattttggagttgcgtttttggaattcggagtttggttttcggaattcgacatttggaattcagaattataatgagtggaaaattttaattattgcgtgtttaatgacttggttttgtagcgatttttatttgatgaattgtttttttgtttgatgttgggatgctacttttaatggtttgtcatttgtaagattaaaaataaacataaaataagtagaaaaataaaagctacgaatattaaaaaattagatatcttcattatcaaattccgatattaaatcattatatttttcagaatatcttgcataatcttcattattattaaaagctagccatagacctctatcatcatataaatgatatattaagtttttagtattgttaattatatatatttcagaataattatcattctgattgatatttggaactaaccctttaaagtcttgattggatatagcttttaataattttttatattttatatcttttatggaacacttatatgaaaactcctcgcacaaaatattatcatccttctcctttttatattctttaaagtaatacaattcatctattgttaacgatgtaaatttttttataacatttgttttcttataaggttcactataaacatatactacatgaaccaaatttatagaatcagaaggcgaaaacaaatcttcaaaaatgtttattgcattatcatatacagctaaaaaataagtattattgatagttttaccgtcctccaaaaactggtatttatcgccacttaaacttaaatgaattgcgttttttacctttctaaaattcaacttttttatatccaaattatttatatcaaagcacataatttacaacaccttattcccttaagatttttccttctttagttaaagaagctattctttttcctttgttatttattaacttccaataagaaccaccatgtgattgccctttatttttggaaatagtccatttagtttttggatctctccaggtaggatttttcccttaaaccttttgagtaaatttaccaatactcatccccttatcatttaacaaacttttattaatgtttttggttatattatgagtctttactgcttttagattgtaaaaattatcgtcataaatagtggcattttccgagattcaaatggtacaaagtacattgtaatatgcataatgatacctgtaattaatgtaataatagaaaagtgtatatatatcatatcgccacctgctatacaacttattaaataattaattccaagacatattaattatctaattataaccttagttacgttattacataatataaaaatatataataacttatttgcttgctcctttcacttttaagagtaataaaataacctgaaacatagactttaacatccaagttcaggttagcgtaatgtaaatgatttactttgttatattatgattaaacatctaattctctgcttgtaagtgctttaatcatctctggatcagcatgtgagaaaaattggctattactttcttctaatgtcgcaatttgttgtttatcttcttctgtaagttcaaaatcaaatatatctaagttttgagccatacgttctggattcactgattttgcgagtacaacgatgtcacgttctactaaccagcgtaaaataacttgtgcaattgatttgttatatttatctgcaatggcctgcaacaattgattttggaataattgatttttaccttctgcaaatggtgcccaagcttctaccacaacattttcttgttgaagtgctgcaacttgttcttcttgttgatggaatggattaatttctatttggttcacttgtggttgaatttgattgtgaatacctaaatctacaattcgatcaacgccgaagttagatacaccgattgctttaattttaccattttcttttaactcttctaatgcacgccatgagccatatacatcattataaggttggtgaataagcactagatcaagatagtctaaatttaatcgttgtaatgatcgttcgattgatttgatagtatcttcatagtttacattttcaatccatactttagtcgtaatgaatagttcacttctatcaatacctgaagcttcaataccttgacctacttcagtttcatttaaataactttgcgctgtatcaatatgtctatagcccgctttaattgcttctttaaccgcttctgctgtttgttcttgaggaatttgaaatactccgaagcctaatactggtatctttacatctttacttatttcaatatgattcataaaatgaacctcctttatcttgtaagtccactataaaccatggagcgaactctatagcaagccataggtttactttctctcccaaagacgttcaacattgtcatcatgattatcactagcattgattttagcaatatgattatcataattatcaattttatattgtagtaaatctctcgcatcatgaattgtctttaagttttcatttaattcttcgagttgcttatttaaaatttgcttttgctgtgcttgaatattttcatttttaggaagctgcgctaacctgcaaaattcgataagcgattcaatactgacgcctgcatttcgcaaatttttcactaaataaatccaatttaaatcactatcattatatattctatatccattttcatctcgattaacaggtggaatcacaccaaccttttcataatatcttaaagtgtcttgagatatattcatgagcgctacgacttctttagttttcattgcgactatcctttcagttatgttggtggcatcttaagtaatgttgctttatatattaccatcctcgtttgaatacctcttattttattactcaaatttaaatttgtctcttttttaacattttacatttcatcgtttttaattactttaaaaattgtataacttaaatatttaaaatgatataatcactaagattgataatatttaattttttaaaaattattttcgttgcaatttttgggtgatgcggaaaatttgggtgatcgattgtttatatgcatcaacattctttgtggattgtttgacagtagacagtcatttgtatacgttaacgaattttgaaaaattgaatcattatttaatcataatattcattgcgcacgcgcaacacaaaaaggagacatgtcaatgacatatagaataaagaaatggcaaaaattatccaccattacgttattaatggctggtgtgattactttgaatggtggtgaattcagaagtattgataaatatcaaatcgctgtggctgatacgaatgttcaaacgccagattatgaaaagttgaggaacacatggctggacgttaactatggttatgataagtatgatgagaagaatgacgcaatgaagaagaagtttgaggctacggagaatgaggcaaagaaattacttagtgagatgaaaactgaaagtgataggaaatacttgtgggaaaactcaaaagatttagatacgaagtctgcggatatgactcgtacctatcgtaatattgagaaaatcgcagaagcgatgaagcataaagatactaagttaaaaatagatgaaaacaagaagaaagtgaaagatgcccttgagtggctgcataaaaatgcatatggaaaagaaccagataaaaaagttgctgatttgacctcaaactttaaaaataaaacttctagaaataccaatttaaattggtgggattatgaaattggaacacctagagcattaacaaatacccttatattgctgaatgatcaattttcaaatgacgaaaagaaaaaatacactgcccctatcaaaactttcgccccagaaagtgacaaaatattatcatcagtaggacaacctgaacaagctaaagggggaaatttagtagacattgctaaagtaaaacttttagaaagtattatcgaagaagataaagatataactaaaaattcaatagatgcatttaataaagtcttcacttacgttcaaagtaatgcaactggtaaagaacgtaatggattctataaagacggctcttatattgatcatcaagacgtcccatacactggtgcttatggcgttgtactcttagaggggatttctcaaatgatgccgatgataaaagaaacaccttttaatgataaaacccaaaatgatacaaccttaaagtcatggattgacgacggatttatgccactcatttataaaggtgaaatgatggatttatcaagaggtagagctatcagtcgtgaaaatgaaacgagtcatacagcgtcagcgactgtaatgaaatcattgttgagattgagtgatgccatggatgattcaacaaaagctaagtataagcaaatcgttaaaacttctgttaaatctgattcaagttacggccaaaatgatacattaagctcttattcggatataagcaaaatgaagtctttaatggaagacagcactatttctactaacggtttaacacaacaacttaaaatatataatgacatggatcgtgtcacctatcacaataaagacttagactttgcatttggtttaagtatgacgtcgaaaaacgtcgcacgttacgaaagtatcaacggagagaacttaaaaggttggcacactggtgctggaatgtcttatttatacaatagcgatgtgaaacactaccgtgataacttctgggcgacagctgatatgaaacgtttagcaggtacaacaactttagaaaatgaagaacctaaaggtacggatgttaaaaagtcgagtaaaacttttgtaggcggaacaaaattcgatgaccaacatgctagtatcggaatggattttgaaaatcaggacaaaactttaactgccaaaaaatcatatttcatattaaacgataaaattgtcttcttaggaactggcattaaaagtactgattcatcaaagaatccagttacaacgattgaaaatcgcaaagcgaatgggtatacgttatatacagacgataaacaaacaaccgcttccgataatcagggaaccaattccgtctttttagagtcaaccaataaacctaaaaacaatataggctatcattttttaaacgaatcgaaaataactgtaaaaaaagaaagtcatactggtaagtggagtgatataaataaaagtcaaaagcaagacagtaaaactaatcaatattatgaagtaactcaaaagcattctaatacagatagtaaatatgcatatgtgttgtatccaggcttatctaaagatgactttaatacaaaaaaagataaagtaactgtcgttaaacaagatgatgacttccacgttgtgaaagataatgaatcggtttgggctggtgttaattacagcgatagcactcaaacttttatcattaacaacactaaagtcgaagttaaagcaaaaggtatgtttatacttaaaaagaaagatgataaaacttatgaatgtagcttctataatcccgaatctacaaataccgcttcagatattgaatctaaaatttcaatgactggatactctattacaaacaaaaatacgtcgacttctaatgaatccggcgtgcgctttgaattacaacaaacattaaataaagatgataattaatgatttaaaattatagtaacatgatggtttattatatttcttttttcaaaatacacgagtcatatccctcgttaaaaactattactaaaaatcaaaaatataaaaaaatcaaaaagtatgttttaaactttatgaaacgtgttatacaaatagtgtaatatcctacaaaacaaaaaggagattgagttatgaaactaaaatcatttgttactgccactttagcattgggattattatcaacagtaggtgcagctttaccgagtcatgaagcatctgcagatagtaataacggttataaggaattgacaatggatgggaaacacactgtaccttacacgatctcagtagatggtattactgcattacatcgaacttactttgtttttccagaaaataaaaaggtactttatcaagaaattgacagtaaagtaaaaaatgaattagcttcacaacgtggtgttacaacagaaaaaattaataatgcgcaaactgcaacttatacacttactttgaatgatggtaataaaaaagtagtgaatctaaagaaaaatgacgacgctaaaaattcaattgatccaagtacaatcaaacagatacaaattgtagttaaataataatttgaaaatgaagaataattacatgaggcaaacgctgaaaaattgcgtttgtctttttagtatgaaatgaatgatcgaacttgtaatttattattgattgcttctactgacaatagattagattggcctatactaaagtaaattctatattaatgtcttcctcaatttattatctaaacataacagcaaatctcaaatatctggaacctaaataaatcccctcactaccgctaatagtgaagggatttattttattacttagacgtaattataaatatatttgttctattgtagtcttgcttaatcatataaaaaaactaccatttccaaataacgcattttgaagtcaattttcataaaccgtcattacatttccgcattcattattcagcttctctaatttcgtccgcaatatctttatagtcaatatttgcatttatgaaatcttcatcttgaattggaaaatgctgttcaaatgtttctatattttggatttctaccttaacatcttctacttcaaaatctaagacatgtccaccaaaattacgatcatcatttgcaaagtgtacatggaatcctgctgatccgataccatggaatagttctggtgtaaagaacccaacgactgaacctttgacgtatgtttcagtttgctcaggttgtcttctagctgaatcgattaaacgtgtataaggtggctcttgtgccggcatcatacgtacatgcatttttttaaataagcctgaaatttttactgcagaaaataaattttcactcaacatcttttccttaatttctgcaaaaactgcttcagaagatttatctttcgtttcatagcttgtatctgctacgaatttagttacagttgcatatggtgttaactcatcaccttttaattctacaaattctttatgttcatttgcatggtaagcttttccatctaaaaagatgacctcaccatttgaacctgttagtgtagcgatacctaggtcaccatgttgcaataattcatttattgatgcagttccttttaataatcctgccattaatgtgcctaatgtaccatgttgatataaaacactagccataaaatttcccactcctcattaacatttatctttgttttagttaaatacgtcaggtaacatatttgttgaaagtttgatattatctttgtagtttacaggtatatcaattaatactgggccatctgtttcatacccctctttaattgccgcttctaattcttcttgattagtaactcgtaaaccttttgcgccaaatgattcagcatattttacgaaatctacaggaccgaagtctacgcctgatgaacgtttatatttcatttcttcttggaattcaaccatattatattttccatcattccaaataagttggataatgtttagatttttacgtacggccgtttctaaatcttgtgatgaaaataaaaagcctccatcgccagcaacggatacaacttgcgtattagggcgtacaagtgcagctgaaattgcccacggtaatgctacaccaagcgtttgcataccgttactaaataataaatgtcttggattgtaacttctgaaattacgtgccatccaaatatagtgactaccaacatcaactgtcactgttgtttcatcagttaataccttttgcatagattctataatttcaactgggtgtaagatgccttcttcatgcgtcgctttaataccagtttcttcatcaatatgcgctcttaactgttctaattcatccaaatgttgttgatttataaatggttcatctactttgtcagaaatcatttcaatcgttttagcaatattaccaatcaactcttttttcggttgcatataattagtaatttcagcttgaacttcgtcaatattgattatttgcgtatctaattctttattccagttactagcctcatattctataggatcataaccgattgtaacaactaaatcacttttacgtaataattcatcaccaacttgattacggaataaacccactcggccaaagaaatgattttctaattcacgactaatcacacccgcaccttggaatgtttctacaacgggtaaattggtacgctctactaatttgcgaatggcattcgtttcgtctgcacttgaacttctcattccagctagtaaaaccggaaatgatgcatttttaatcgcttcaatgacatcattaatatcctgttcacttggtacacctaaatttggtttttgacaaagtgatatcgccttagattcaactggtgaagaaatcacatcttgcggaatactaataaaacttgcgccatttttccctgaagtagcaattcgaattgcatttgtcataacttctgataatgattcaggatcttgtacttcttcactatattttgatgaatattttaataaagcagcattatcaatactttgatgcgttaatcgtaataaatcattacgtttcacttggccgcctaacgctaagacaggatccccttcagatgtagctgttaatagtccagtcgttaaattacttacaccaggcccacttgtaacaagtactacacccggtttgcctgttaatcttccaataccttgcgccatcattgcggcgttttgttcatgacgcgtgacaataagttcaggaccatcatcaattaaagcattaaatagatagtcaatctttgcacccggaataccaaaaacatattctaccccattatttttcaaagtatcaataaccatatcggctgcagtgtactttttatcagtcatttatattcatttcccttcaaatgtgatgtatagatgtgtattacatgtaattacattgtgatttgtaatctaatgatagttacgcaaaattaatgatgtttatcaaaattttacatgtacgattagatttgcaatacataaaaattgccttcattacattatataacctttgtaagatgaataaaaatcgttatttgtaatactaagtattccaaaaatgcatgagtagattttgtagggagtgattatgagtgatggaggattgattgatgtgaagaattgttacaataatttttggatgtcgtgtttagtcaatggcgatttgaaattgttgttttatggcggactgaaaatgttgtttttggcgatttaaaattgtcatttcgataaaaaaagccacagcaagacttagatctaactgtgacttatacatttcatacttatatttatcgattgtttttatagttataaatgatagatgcagttcctaaacaaattaagaagataatcattaaatacatagaaaagttgtctgttttaatataaaacctaaaaagtagaaacaccagcatcgcaacaataaaataaacaggaataaaagctttcttccaaaatataaaatctttcaattaagtcactccttattttgataatactcttaaatcatggttcttgagttatcgtctggttttcgtcccgtagttcttccattgagcctctatgattagaacacaatcgtccggttatcatacggcctccgcaagctaaatgataatttaataatggacacttttgattgtttaagcatgtacaaatcatacgtgcaaatcactaatacatagttgaatttattctattcctgagacattaaataaaggaaaattcattatactctacacgttccatattccccacacaaacgtaaaaaaacacctcgacataacttcgaggtgttttgtatatatcgtccgacaattaacgttttgagaattgaggtgaacgacgagctgctttaagacctggttttttacgttctttcatacgtgggtcacgagtaagtaatccagcgcgttttaaagaacctctgtattcaggatctgcttctaataatgcacgagcgattccgtgacggatagcttgagcttgtccagtgaaaccaccaccatgaacgttaactaaaacatcatagttacctttagtttcagttacatcaaatggttggtttaagtctaaaattaatgattcgaatggtaagtattcgcgtacgtcacggttattaactgtgatgttaccttcacctggtactaaacgtacacgtgctactgagtttttacgacggcctgtgcctctatattcaacttgtgccaaagtcatttcctccttctaattaaccacgtaattcgtagttttctggttgttgtgcagcgtgtggatgttcagcgccaccatatacaaataattttttaccttgtttttcgcctaaacgagtgcttggtaacatacctttaattgagttttcaattaaacgttctgggttagttcttcttaattcaccagcagtgattgatttgataccacctgggtgatttgagtgacggtagtaaactttgtcagtttctttgttaccagtaaattcgatttttgatgcattaataacgattacataatcaccagtatcaacgtgtggtgtgtaagttactttatttttaccgcgtaagatagatgctacttctgatgataaacgacctaatgtttggccttcagcatcgataacataccatttgcgctcaatgtttgattcatttgccataaatgtttgacgcataataattgtcctcctaaaaaataaatgcttctattcaagctataaacagtttcataacctaatagatgatttcatttgtttcatttttaaaacgtttaatttcatttattttgttaactgttgttcgtttctgcttatatatcttgtaacacaataagtttccggggcttatcgtggggtggatataaaacaataccgttaataatcttataatttcacaagctttttgtcaatggcaatcagtcattttgtaatgattttttacgatgtattttgatatcgttgccaaagtcttttaataactcattttcatctaaataaatcttctctaaatataatccttcagccgttgcagtgaaaggaacattcttacgattctttgattcaagtagcttcggcacatcagaaatttcatgtcgtccttttccaacttctattaaaaatgcaactaagacacgcaccatgttatataaaaatccagatccagtgacaatataatcaaagccatcatctgtctttacaatttcactttggtataatgttctaaccttgctttctacttcagttttttgcgaacaaaatcccgtaaaatcatgtgtacctatgaattgttgtgccgctctgttcattttatctaaatccaacgtttcaggaataaatgttttcaaaccactttgaaatggatcgcggtgttgtgcttgatatactttatatcgatagcgtttacctacacaatcgtaacgacaatgaaaatcgtcatcgactgtaactacattgttgacataaatatcatcaggtaacgttcggttcattgcatattgccattgtgacataggtatattcagctctgtgtcgaaatgaaagtattgctgtatcgcatgtacacctctatcagtcctacttgaaggatggattctcacatgtcttttatgcatgcgttgtaatagcttttcaaattgttgctgtaccgttcgaccattttgttgaatttgaaaacctagaaaattatttccttgatacgcaatttctactaatatacgcatgaatttacactcctgaatattttaatacgaataaaataatagcaattgggataatcatgattaaagataacgtatctctcaattgccatttaagctgtctgtagctcgttctcttaacattggcatcataacccctaacttccattgcgaccgctaattcttcggcgcgttggaaagctgagatgaatagtggcactagtagtggaataaatgatttaatacgtgttgcaatgttccctgaacttatttcagaaccacgcgacttttgtgccaaaataattttatctaactcatccattaacgtcgggatgaatcgtaacgcaatggacattatcatacttaattgatgaactggtaatttaaacatctttagtggtgcaagtaatctttcaaacgcatctgttaaatcaattggacttgtagatagtgtcataattgttgcaatcatcacaatcccaattaaacgcaatgatatataaagcccttctaaaataccattagtttcaatcgtgatgccatgccattcaactaatacatatccacctttagttaaaaatatatgcatcattaatgtgaagattaaaaagaaaaatattggtgttaaacctttgattaggaaccataattgaatttttgctaatctcataatgaataagataagtgcaaacacccaaagatatgttaatggtgaatgacagaaaaatattaatataataaaaagaaaaacaaacattaactttgctcttggatcaagatgatgaacaaaagaattaattggtaaatatcgccctataatcaatttatttttcatgttgccactccttatacaagcttacaaatgcttcttcagttaaggcaatatcttttaattttgtttgatatttttgttcaaagtcatattgtaactgaacaatttctggcaaaccaatatgccaatccgccaatttttttttatctttgaagagctcttttggtgatgtttgcgacactatactaccttctttcataacgatgacttcatctgcataacgcgcgacttcattcatatcatgtgaaattaggataattgccttattttcatctgtttgtaatgactttagtaatcgcattacttgtcgtttactttgtggatcaagtcctgctgtgggttcatcaaccacgataatatcaggattcattgccaatatcgatacaatcgctattttacgcatttgtccacctgacatttgaaatggtgattgtgacattacatctcttgaaaagcctaaatccatcaacagacgatgggcatagtttttggcttcatctaaattcattttaaagtttttaggtccaaatatcatttcacgctctactgtgtcctcaaataattgagattcgggaaattgaaataccattccaattctttttcttacaggtctaatatatttatctttggtcttatgtgtaatagtaatgtcatcaactgtaactgtcccagtagttggctttaacagtgcattaatattttgtatcaatgttgatttaccactacccgtttgtccaacgatggcgtaatatttaccttgttcaaattctgtattaacatcatgaatagcttgatgctggtatggtgtccctttttgataggtataacttacattgtcaaagcgtatagtcatagttgatccaccagcccttcataagttaagaatgatgtttggtatcccagcatttgatttattttgattgggaatggcaaatctagacctattgttgttaactcttctgcatggtcgaaaatttcaatcgctgtgccttctttatagacagtccctttattcataacgataacatgatctgcttccatcgcctcagataaatcatgcgtaatagaaatgattgtaatattatgttctgatttaacttttctcactaaatccaataaattttgacgtgcatcaggatctaacatagaagtcgcctcatctaatataatgacagaggggttaagtgctaatacacttgctatagccacacgctgcttctgtccccccgataatgcattaggttcataatctgcacgttctaacatatcaacttgtttaagtgcttcgccgactcttctatgcatttcgtcatgtggaaccgcatgattttcgagtccaaatgccacatcgtattttacaattgaaccaacaaattgattatccggattctggaatactattcctatgtcttttcttaacttttcaaaattatcatctgttatagtttgattattataaaaaatttctccagatttaactttctctatgccaatcattaacttggcaattgtagattttccagaaccgttatgaccaacaatagatgtccactgacctttaggtatactaaaagaaacatctttcaatgtgaaggatgcatcactttgatattgaaatgaaacatttttaaatacaataactgaattcttatcctccacttgtctctctcctttacgattcgtgtatctatcatattttacaatatttataaatcgctgtatatgacattgactgggttctctatatattactagtattttctgactcatttctagtctttaaagtgttgtttaacaactaatgataaggacatttatccctctctaacaattatgtataaacgttaataaaataaatgatttactaacatagggttggccgcgtttgattcaacgataatactttcacttcatacagttctagtgaaattaatcaaactagcttgatcatatttttagattcgcactcaaaaaagtagatataaagaaatcggacttaaaaacatttctgttcataagtccgatatcttattcaataaaaaagcgcgcaccccatcataagtttgttgagttcacgctttaaatctttatttagttgatggggtactctgagctagacaatatttgtatgtggcaaacattatcgttgcactcatttgctttatataaaagtagttagtgtatttatataaattcttatactaattcgataattactgattcagcaccgtcaccgcgacgagggccttgtttaaggatacgagtgtaaccaccttgacgttctgtgtaacgctctgcgatttcaccaaataatttttgaagtgcagtttgtgtagtttcatcttcgtttaagatttcaacattacgtaaagttttagctgcattacgacgagaagctaaatctccttttttacctaaagtgattaatttctcaacaacactgcgaacttcttttgcacgagcttctgtagtttcaatacgttcactaataataagtgatgtagctaagtcacgtaacatagctttacgttgatcagaagtacgacctaattttctgtaacccatgagttaacctcctttatcaatcttcttttcttaatcctaatcctaaatcttctaatttgtatttaacttcttctaaagatttacgacctaaattacgcactttcatcatgtcagcttcagatttgtcagctaactcttgaacagaattgattcctgcgcgttttaagcagttatatgaacgtacagataagtctaattcttcaatagacatttctaatactttttctttttgatcttcttctttttcaatcatgatttcagcgttttgcgcttcatcagtaagaccaacgaagatattcaagtgttcagtcattatttttgctgctaatgaaactgattcttgtggtgtgattgaaccattagtccaaacatccaatgttaatttatcaaaatcactgctttgacctacacgtgtattttcaacagtatagttcacacgttcaacaggtgaatacaatgaatcaacagggattacaccaattggtaaatcactagtattattttgttctgctaatgcgtaacctctacccttgttagcaactagacgaatttttaagtgaccacctttagatactgttgcaattttaagctctgggtttaaaatttcaacatcactatcatgtgtaatgtcgcttgctgttacttcgccttcatcacgtacatcaatttctaaagttttatcttcttcagagtaaattttcaatgctaattgtttaatgttcataataattgtagaaacatcttcaactacattgtctactgctgagaattcatgtaaaactccctcaatttcaatatacttaacggctgcacctggtaatgaagatagtaggatacgacgtaaggagtttcctagtgtagtaccgtagccacgttctagtggttcaacaacgaacttaccgaatttagcatcttcactaatttcaattgtctcaattctaggtttttcgatttctatcatttaaatatcctccttatatacgtcgacttaatttaaaatgtttgctcagtgacctgtaacaataccatcataaattatacacgacgacgttttggtggacgacaaccgttatgaggtactggagtaacgtctctgatcgcagttacttctaaacctgcagattgtaatgcacgaatagctgattcacgacctggaccaggtcctttaactgttacttcaactgtttttaaaccatgctccatagctgatttagatgcagtttcagaagccatttgtgctgcaaatggtgttgattttttagatcctttgaatcctaatgcaccagctgatgaccatgataaagcattaccgaactcatcagtgatagttacaatagtgttgttgaatgttgaacggatgtgtgctacaccattttcaatattctttttcactctacgtttacgagatacttgtttacgtgccatttaaaatttgcctcctttacctattattttttcttgttagctaccgttttaactggtcctttacgagtacgcgcgttgtttttcgttttttgaccacgaactggtaaaccacgacggtgacggataccacggtatgatgaaatttccattaaacgtttgatatttaagttagtttcacgacgtaagtcaccttcgactttataaccgtctacaacttcacggatgcgacctaattcgtcatcagttaaatctttcacacgagtatcagctgatacgttagcttcttcaagaattttttgagcagttgacgtaccgataccgtatatataagttaatgagataactacgcgtttttcacgtggaatatctactcctgcaatacgtgccatattaatttacacctctcttttattaaccttgtctttgtttgtgttttggattttcacaaattaccattactttacctttacgtttaatgactttacatttttcgcaaataggttttactgatggtcttactttcatttttatacctccctatattatggagtgacgattatttataacgataagtaattcttccgcgtgttaaatcgtacggagacatctcaacagttactttgtcgccaggtagaatacgaatgtaattcattctgattttaccacttacgtgagctaaaatctcatgaccattttctaattctactttaaacattgcgttcggtaaagtatctaatacagtaccttctaattcaattacatcttgtttagccattgattaacttccccctttttgcaatagtaaggtaatcgtcaatagacaactttattgttacgaatctatcagtgattaattttataagttaaacaaaaattacgggaattaattatcgttaattgccactctcatctatctaatatgattaaatcatgcctcacttaaaatagaccgctaaaagttgatctattacaaatgatctaaaatatcaatgacatctttggtaacgtcgctaatatcttttgaaccatcaatatttttcaatacacctttttgatcatagaaatctaaaataggcttagattgtttaatattaacactcaaacgattagctaccgtttcaggattatcatcttctcgttgatacaatttaccaccatcgatatcacaaataccttcgaccttcggaggattaaatacaagatgatacgttgtaccacatgactcacagattcgacgacctgtaagacggttcattaattcttcttccggaacttcgatattgatgacagcatcaatgtttctgtcaagctcagacataatattatttaatgcctcagcttgctcgattgttcttgggaagccatctaataaaaagcctttttttgcatcgtcttcagaaattctttccttaacgatacctacagtcacttcatcaggaactaattcgccacggtccatataagacttagcttctttacctaattcagtttcttcttttatagcttttctgaacatgtcaccagttgaaatgtggggtattgggaatttcttgacaatttcacttgcttgagttcctttacctgcgccaggtaaacccatcaaaatgatattcataagtgccctcctaaaattatctaccaccaaagcctttatattctttttgagatacttgagcttctaaagatttcattgtttcaatcgctacaccaataacgataagtaaacttgtaccaccaatctgaattgattgtggtaatcccataaacttagttgctaatatcggtagaattgaaataacggctaagaagatagaacctacaaaagttaaacgatataaaactttagtaatatattttttggtttgttcaccaggtctaatacctggaacatagctaccttgtttcttaaggttatcagccattttttccggattaacttgtacaaatgcatagaagtatgtgaatagtataattagtacaatatatacaaccataccaacattacttgaaggatttgcagcattcgcaatgttttgtgcccattctttatctggatagaacaacgttaatgttctaggcagtaagaagaacgccattgcaaagattacaggaataacaccggctgagttcacttttaaaggtagataagttgcctgtgaacctaatctttgagcagtttgtttcttagcatattgaatcggaattttacgaacggcttcaagtacataaatagcacctacagttaatagtatcagtgacactaaaagtcctaatactttcaaccatgctaatgatgtatcttcttgcccaacgaacgcagtttgtccaaattgaattagactggctggcaacgttgataaaatacccgcaaatatgataatagaaataccattaccaacaccgaactgagtgatttgatcaccaagccatattaagaaagcagttcctgctgtcaaaactagtgctattaataaataactcataattgactgattgataatcagcgcacctttgagataattattaaattggaatgccatacctatagattggataaatgctaaagaaattgctaaataacgagtaacgttatttaactttcttctacctacttcaccttgttttgcccattctgagaatttagggacaatatccatttgtaataattgcattacgattgatgcagtgatgtagggtacaatacccattgcaaaaatagaaaatcgtttcaaggctccgccaccaaaagtatttaataactcagtggcaccttgagaaccttggggattatcaaaagctgcaggatttactcctggagctggtatataagtccctattttaaaaattactaacattgctagtgtgaagaaaatcttgttacgaacctcttttgttctaaagaagttcacaagggtttgaatcattagatcacctcgtgtgctccacctttagcatcaatagcttctgctgctgaagctgagaatttatgagctttcactgtcaatttcttatcaagtgaaccattacctagtattttgataccagatttttcattcttaacaacaccagattctactaataaagctggagttacttcagtaccatcttcaaatttattaagttggtctaagttaacaatagcatattctttacgatttatgttagtaaaaccacgttttggtaaacgacggaataatggtaattgaccaccttcaaatcctggtcttacaccaccgcctgaacgagctttttgacctttgtgtccgcgaccacttgttttaccgttacctgtcgcaacaccacgtccaacacgattgcgttctttacgtgaaccttctgccggttttaactcatgtaatttcatttcggcacctccttgattatttttcttctactgttactaagtgcttaactttgttgatttgcccacgaatagcagggttatcttcaacaactactgaactgttagtctttttaagacctaaagcttcaacagttttacgttgtgtttcaggacgaccaataacactacgagtgagggtaatttgtaatttagccataactagttttccctccttaattgtataattcttctactgttttgccacgtaatttcgcaacatcttcagcatttttaaggttttgtaaaccatcgattgtagcacgaaccatgttgattggtgtgtttgatcctaatgatttacttaagatatcagtgatacctgctaattcaagtacggcacgaacaggaccaccagcgataactcctgtaccaggtgcagccggtttcataaatacgcttcctgaaccgtaacggccagtaattgtgtgtggagttgtaccttcaacacgtggaacaactactaaatcttttttagctgcttcaacagcttttttgattgcttctggtacctcttgagctttaccagtaccgaaacctacacgaccatttttgtctccaactacaactaatgcagtgaaacggaaacgacgaccaccttttacaacttttgctacacggttgattgtaacaacgcgttcttcaaattctttcgtctcttcttctctacgagccatgtatttgtccctcctttaaattaaaattctaatccgctttctcttgctgcttcagctaatgctttaacacgtccgtgatataaatatcctccacggtcaaatacgatttctttaatgcctttgtcagcagcttttttagcaattgcttcaccgactttagttgctaattcaactttagttgctgtagtagcaatgtcgctgtcttttgaagaagcttgagctaatgttacgcctttattatcatcaataatttgagcgtagatatgcttgtttgaacgatatacgtttaaacgtggcttttcagctgtacctgataagttagtacgaacacgagcatgtctttttaaacgcactttatttttatcaattttactgatcatttcaatactcctttctttagagtttatctattatttaccagttttaccttctttacggcgaacgtattcaccttggtaacgaatacctttacctttgtaaggctctggaggtcttactgaacggatgttagatgctaatgctccaacttgttcttttgaaataccttcaactttaacgactgtgtttttctcaactgagaaagtaatgttttcttcagctttaatttctactgggtgagaataaccaacgttaaggattaagtctttaccttgcatttgagcacggtaacctacaccaacaagttcaagtacttttacgtatccttgagaaacaccttgtaccatattgtttaataaagcacgagttgtaccatggtttgttctatcttctttagaatcagatggtcttacaacttcaattgtgttttcttcttgtttgaatgtcattctttcatttaaagttcttgataattcacctttaggacctttaacagttacatgatttccatcaaaagttactgttacgtcactagggatgtcaataattttcttaccaacacgactcatgttatggcacctccttattttttattaccaaacgtatgcgataatttctccaccaacattacgttttcttgcttctttgtcagtgattacaccttcagaagttgatactaatgcaatacctaaaccatttaatactttaggcatttcgctagcttttgcataaacacgtaaacctggttttgaaatacgttttaatcctgtgataacacgctcatcgttttgaccatattttaagaataaacgaagtacaccttgtttatcatcttctacgtattcaacatttttaatgaaaccttcactctttaagatttcagcaatttcttttttaatatttgatgcaggtaattctaacttctcgtgacgcaccatgtttgcgtttcttacacgagtaagcatatctgcgattggatctgtcattgtcattgattgttgcctcctttcagactcttttttattaccagctagctttacgaacgccagggatttggcctttgtaagctaattcacggaaacaaatacggcataatttaaatttacgatatacagaatgtggacggccacaacgttcacaacgagtgtattcacgaactgcatatttttgttttttttgttgcttagcaaccattgaagttttagccacttaattagcctcctttaaataattatttacggaatggcataccgaagttagctaacaattcacgagcttcttcatcagtgttagcagtcgttacgataacaatatccattcctctaactttacttactttatcatagtcgatttctgggaaaattaattgttctttaacacctaaagtgtagttaccgcgtccgtcaaatgcttttttagaaacaccttggaagtcacgtacacgtggtaatgatactgaaattaatttgtctaagaattcatacattctttcaccgcgaagtgttactttcgcaccgattggcataccttcacgtaaacggaaagtcgcgattgattttttagctttagttactaatggtttttgaccagtgatcaattctaattcttcaacagcattgtctaatactttagaattttgtactgcgtcacctacacccatgttcacaacgattttatctatttttggtacttccattactgaactataattgaattttttcattaagttttcagtaacttcagtgttaaacttttcttttaaacggttcaaagtgggatcctcctttcaacttgttattaattattagatttaatttcttcgccagattttttagcgatacgaacttttttaccatcaacaaatttgtaacctacacgagttggttcgtttgttttagggtccaataattgtacattagaaacatggattgctgcctctgtttctaagattccaccttcaggatttaattgagttggtttttggtgttttttcataatgttaacaccttccacaacgacacggtcttttttaggtagagtagcaattactttaccttctttacctttgtctttacctgcgataactttaacgttgtcaccttttttgatatgcatgtgggcacctccttatttgtattggttgttattaattaaagtacttctggtgctaatgatacgattttcatgaagttaccttcacgtaattcacgagcaacaggtccgaagatacgagtaccacgtgggcctttgtcatcacggatgataacacatgcattttcatcaaatttgatgtatgaaccgtcattacgacgaacacctgacttagtacgtacgattacagctttgacaacgtcaccttttttaacaacgccacctggtgttgcatttttaacagtacatacgataacatcgccgatgtttgctgttttacgaccagatccacctaatactttgattgtaagaacttcacgagcaccagagttgtctgctactttcaagcgtgtttcttgttggatcattagttaaacctcccttatctctaaacttgtattaaataattactgactcttcaacaatctctactaaacgaaaacgttttgttgctgataaaggacgagtttcttgaattttaacaatgtctcctaatttagctgaattgttttcatcatgagttttgtattttttagagtattttactcgtttaccgtataatttgtgtgttttgtaagtttcaacaagtactgtaatagtcttgtccattttgtctgaaacaactttacctacataaactttacgatcgtttctttcgctcacttttgtaacctcctcttacttaattattgattagccttactttgttcaatttctctttcacgagcaacagtttttagacgtgcaatcgtttttcttactgtacgaatacgtgcagtttcttctaattgacctgtagctaactgaaagcgtaggttaaaaagctcttcttttgaagatttgatttgttcttcgatttctgaagtggttaagtctctaatttccttagctttcatttgtttcaccacccaattcctcacgttttacaaacttagtttttactggaagtttgtgacttgctaaacgtagtgcttcacgcgcaacttcttcagaaacgccagcaacttcgaataaaattctacctggtttaacaactgcgatccagccttcaaccgcacctttaccagcacccatacgtacttctaaaggttttttagtatatggtgtatgtgggaagattttaatccaaactttcccgccacgtttcatgtaacgtgtcattgctatacgagcagattcgatttgacgagatgtgatccaagacgttgttgtagcttgtaaaccaaactcaccaaatgttacgtagttaccgcctttagaacgaccagttgttttaggacgatgttgacgacgatattttacacgttttggtagtaacattattattttcctcctccactagtgttcttagtaggaagaacttctccacgatagatccatactttaacgcctaatttaccgtaagtagtgtcagcttcagcgtgtgcataatcgatgtcagcacgtaacgtatgaagtggaacagttccttctgaatattgttcagcacgagcgatgtcagctccgcctaaacgaccagatacttgagttttgatacctttagcaccaagtttcatagctctagtgattgcttgtttttgtacacgacggaatgaagcacggttttctaattgacgtgcgatgttttcagctactaaacgagcgtcaagatcaacttttttgatttcaattacgttgatgtgtacttttttatcagttaacgcatttaatttgttgcgtaatttttcgatttctgaaccgcctttaccaattaccataccaggtttaccagtatgaattgcaatgttgatacggtttgcagcacgttcaatctctacgtgagaaactgatgcttcttttaattcattatcaataaatttacggatttttaaatcttcgtgtaaaagtgaagcgaagtctttttcagcataccatttagcttcccaatcacggataataccaacacgaagtccgattggattaattttttgacccacagtattccctccttaaaagttaattaagcttctttagcttcttctttaccgtcacttacgacgattgtaatgtggcttgtacgtttgttaatcgcacttgcacgaccttgcgcacgtggacggaaacgttttaatgttggtccttcgttagcatatgcttctttaactactaattcatctgtgttcatgtcatagttatgttcagcattagctaaagcggacattaatactttttcaattactggtgatgaagctttgtttgttaattttaaaattgcaatagcttcagcagcatttttacctctgattaagtcaagaactagtcttactttacgaggtgcgattcttattgttctagcaaccgcttttgcttccattaggatgtcctcctctacttaatagatattatcttcttgttttcttgtcgtctgcaacgtgtcctttgaatgtacgagtaggagcaaactcacctaatttatgacctaccatatcttcagttacatatacaggtacgtgtttacgtccgtcgtatactgcaaaagtatgtccgatgaaattagggaaaattgtagaacgacgtgaccatgttttgattacttgtttcttttcgcttccttcttgagcttcaacttttttcattaaatgctcatcgacgaaaggtccttttttaatactacgagccatttgggcgcctcccttcttattatgtgcgtgcagctttaagccgcacacccaaataagttgattatattattttttcttacgtccacgaacgataagtttgtctgatgattttttaccacgacgagttttcttaccaagcgtaggtttaccccatggtgacattggagatggtctaccgataggagcacgaccttcaccaccaccgtgtgggtgatcgttagggttcattacagaaccacgaactgttggacggatacctttccatcttgaacgtccggctttaccaacgttaactaattcgtgttgtaggttaccaacttgaccgattgtagcacggcaagtagataagatcatacgaacttcaccagatcttaatctgattaatacgtatttaccttctttaccaagtacttgagcacttgcaccagctgaacgagcgatttgtccacctttaccaggtttaagctcgatgttgtgtactactgtaccaactggaatgttttgtaatggtaatgcgttaccaactttgatgtcagcttcagcaccactttcaacgatttgacctacttctaatcctttaggagcaatgatatatcgtttttcaccgtctgcatatacaactaaagcgatgtttgctgagcggtttggatcatattgaatagaatcaacttttgcattgataccatctttgttacgtttgaaatcgataacacggtattgacgtttgtgtccaccaccatggtgtcttacagtcaatttaccttggttgttacgtcccgcttttttcggtagcggttttaataatgacttttcaggtgtagttttcgtgatttctgcgaaatctaacgaagtcatattacgacgaccatttgttattggcttatactttttaatagccattgtcgcttacctccttaatggtaattgttttattagttaaataagtcgattgatccttctttaagagttacaatcgcttttcttcttttgtttgtatagccttggtaacggcccatacgttttttcttaggtttgtaattcatgatattaacacttgcaacttttacgttgaagatttcttcaacagccatttttacttgtgttttgttaacacgagtatcaacgtcgaaagtgtatttgtcttcagccattgcttcagaagatttctcagtgattacggggcgcttaagaatatctcttgcttccattatccgagcacctcctcaacttttttagcagcagcttcagtaattactaagctgtcagcattagtgatatctaaaacatttaaaccttgagcagttgtcacttgaacgccagggatgttgcgtgctgataattcaacatttacatcttcgttttcagtaactactaatacttttttaggttgttctaatgtagataatacatttttgaattctttagtttttggagcttcgaagttgaatgcgtcaactacagttaagccattctcttgagctttgaaagataatgctgagcgtaaagctaaacgacgcattttcttaggcattttgtatgcataacttcttggagttggtccgaatacgataccaccgccacgccattgtggagcacggattgtaccttgacgagcacgacctgttcctttttgcttccatggtttacgtccgccaccgcttactgctgaacgattcttaacagcatgcgtaccttgacgtaatgaagcacgttgtaaattaatagcttcgaataaaacgctattatttggctcaataccgaatactgcatcgcttaattcgattgaacctgatttagttccgtctaattttaaaacatcataattagccattatgcatttcctcctttcacttcttattatttattaccttttttaattgaagttctgatttctactaaaccttttttaggtccaggtacgttaccttttactaagataactttgttttctgtgtcaacttgaactacttctaagttttgaacagttacagtgtttccacccatacgtcctggcattttttggcctttaaatactctagaagcatctgaagccatacctacagaacctggtgctctgtggaaatgagaaccgtgtgacataggtccacgagattgtccgtggcgtttaattgcaccttggaaacctttaccttttgatacgcctgttacgtcaataacgtcgccagctacaaaagtatctactgagacttcttgacctacttcgtaagcatccacgtctacattgcggaattcacgaatgaagcgcttaggtgctgcgtcagcttttttagcgtgaccttcagctggtttattagcatatttattagattttgcatcttttttgtatgcttttttgtcttcaaatccaacttggattgcgttgtatccatcaacttctacagttttcttttgtaatacaacattttctttagcttctactactgttacagggattaattcaccgttttctccgaatacttgtgtcatcccaatttttcttcctaagattcctttggtcatcgaaagtccacctcctaaaattgtctattataatttgatttcgatgtctacaccagatggtaagtttaagcccattaaagcgtcaactgtttttggtgttgggtttacaatatcgattaaacgtttgtgtgtacgttgttcgaattgttcacgtgaatctttatacttatgcacggcacggatgattgtgtaaactgatttctcagttggtaacggaattggtccagaaacatctgcaccagaacgtttcgctgtttctacaatcttctctgctgattgatcaatcacgcggtgatcataagcttttaatctgattctgattttttgttttgccataattttccctccttattcgtctacatttagtgatagacttctccacgaaaactatcttacacagcgccatggcaaagcggccgggtgtgtcagtaacctttcgcttcatcgcttttcttaaagtccaacgttagttatattacacgaaaaacatcgataaatcaaggcttttcacataatttttctatctgtctaacacatacttttatattttactttatatacttagtcagttcaactattttcgagatattttttatttccttctttattgtaaattcgtaccttgaatcattttattattatcattgaaaattattctatataattagtcataagaacggtggtgaatgaatatgaaaaatggaccaaaattatctttagcacttataggtatctttttaatactttgtgagtttttctatggcattccttttttaggtgcaacgtttattttaagttttggatggcagcctttaatctttaatgcattactttatctaattcttactattatattattagtgaatagacaaaatgcgattagacctatagcgattattccaatatttggtatagtaggtagttttttagctatcatccccttcttaggaattttgattcattggattttatttttcctaatgattctatttgtcctagttgtattatcagcgccaacctatatacctaataaaaatgctcgtgtcatttacacacaatacaaagatggacatagagaataattcttaaaacctttttaatcaggtatataatatagaagaaacacgtccaacaattttaaaagaagtatatttatatcggatatttaaagacattcataatattgctttatgttatttcgcttcttattttatccttacttcaaagaaaaaacgactaccaatcattggcagtcgttttttgtgtctggatttaaccatgaacaaatatgaagtacagaatgaatagtaccattaatacatacattatcggatgtacttctttatgttttttagagataagcattgtaattggatagaaaataaatccacacgcaataccagttgcaattgagtatgataaaggcatcataatgattgtaatgaatgctggcactgcaacttcaaaacttttccagtttatctcagcaaagtttgcagccattaatacacctaccaccactaaagctggtgtcgtaactgcacttgttacaacagcgattaacggactaaagaacagcgctaataggaaacaacaacctgttacgatactagcaaatcctgttctagcacctacagcaacacctgaagttgattcgatataagaagttgttgtagttgttccaaaaactgatcctacaatcgtagctaaagaatctgagaacaatgctctaccagctcttggtaatttattatctttcataatacctgcttgagtagcaacagctactaatgtaccagctgtatcaaagaaatcaataaataagaacgttaaaataacaattaagaactgtatcgttaataattgacttgggtctttaaacgcttcaaatgcagcaccgaacgttggttcaatacttggaatcttacctacaataccagatggcatttgaatcaatccagtgaacataccaacgattgctgtgatgatcataccgataaagatagaacccggcaatttaattgcatataaaataactgtaataacgataccgaatatcgccaaaagtactggtggatcagttaaatgtcccaatgttactaatgtagattcatttttaactataatacccgaactttgtaaacctacaaatgtaatgaataatcctatacctgctgaaacagccatcttcatttgataaggaattgcattaataataacttccctaaaccctgtgacggttaatatcgcaaagaatatacctgagaataaaacgcctgttaaaccaacttgccaaggaatacccatggttaacacaacagtaaatgcaaagaatgcatttaatcccatacctggtgctaacgcaattggatatttagctattagccccatgaatagcgagcctacaaatgctgctaatgcagtcgctacaaaaatggcaccttggtccattttcatatcttctgatacgcctttaacacctgctaaacttaaaacttgcgggttaactgctaaaatataggccatagataagaaagttgtgataccgcctaagatttctcttttaaagtttgttccatatttatcgaactggaaatagtttttcacgaatggatgctcctttttttaaaataccttaatagtttaatatcattcttaataaaaaacaataccaaaagcgaacttttcgtttttctgattcaactttgttcgattttatctataaattcaagttctttaatgcatctttaaacggattattgtctaaaccttcatttttattcatatactttttcatttctttacgagatactttaccagaggatttagacttcatacgctgatccatatgtgcttgcgtttcagaatgtccacaaacacaacgatataccgcttctttccctttaccaaacaacgttaatttctttttacagtttggacatcttgcatttgttttgcgctgtacattctttttcgtcttacaagatggatcttggcacacaagcatctgaccatttttagttttaactttaatcatgaatttaccacacgttgggcattctgtggttgttaaattatcgtgtttatatttacgatcactatttttaatcccatttacaacatctttcgtaaaatctttcatttcattaatgaatgttttcgcctgatatttaccacgttcaattaaaagtaatttttcttcccattgtgcagttaaaagtggcgacgttaattcttctggtgctaattctaatatttgtttaccttttgacgttactttaattttaccgtctcttgattcaatggcattcatattaaataatttatcgataatgtcggcccttgttgcaactgtgccgataccacctgtttgttttaaagtttgcgcatattttttatccttcaattgaataaagttctgagggttctccatcgcttttaataacgaaccttcattaaaatattctggaggtgttgtttcatgttctctaatatttgtttttgaaatcttcacttcatcgccttctgaaaaaggctgttgcatctctgtaatagattcaccttgtctaatagatttaaaacctaaaacagttgttacattctctttcaaaacaaatgtgtgccctgcaacctctaaagttacagttatcgcgtcatactcgtgcggaggcattaaagcttctaaaaaacgctcgacaatcatatcgtataactttaattctctattacttaagtctgacatgacaggtctcacttctgtaggaataattgcatggtgatcagatactttttgattattaaatatcgacatttttgatgaaaatgttttagacattaatgggcgtgcttggtctttatatgttgttgccatcgtcgcctgaatacgttctttcatagtatctaccatatcagttgttaaatagtttgaatctgttcttggataggttacgactttatgtctctcatataagctttgaagtgtattcaatgtttctttaggtccaattttataacgtctatacatatcttgttgtaaatctgttaaattgtacagtgattgcggatacgacttcttatgtttagtagcaacagatttaatcttaccatcgacatttttcaaattattaaccatctgttctaaagtttctttattggtatatcgctgatttgattctagctgaaaatcaaacccttttaccgttaatgataatgtaaagtattgttgtggtttgaactgattaatctcttgttgtcgtgtatttactaattgaatcgttggtgtctgaacacgtcccagggatagctgtgcatcatactttgttgttagtgcacgcgttgcattaatcccaacaatccaatctgcctcacttctcgctaacgctgcataatacaaatcgttatattgacgaccgtcttttaaatttttaaaaccttgttgaatagcttttttagtaactgagctaatccataatcgacggattggctttttgttaccaactttatccaaaatcaatcttgcaactagttcaccttctcgtccagcatctgttgcaataataatatctttcactttattatctaaaattaacgcttttactgttttaaattgtttgcttgttttaccaataacaacagttttcatatatttaggtataattggaaggtcttctaatcgccattcctttaaatttttatcgtattgttcaggtgtcgcatttgtcactagatgacctaacgcccacgtgacaatatattggttattttcaaagtaaccattacgcttctgatttatttgtaaagcatcagcaatatctcttgcgactgatggtttttcagctaatattaaagatttcataaattatcctttctcatacgttcttttatttcgaacgtgcttcatctattccactaatctttgatttaaattcaatgattgcaaatgatgtgttaaatgtattgtaacatgttaatatcactattaactttcatttcagttgaaatactatataataaaagtaacaaaaagtacggaggtaatgacatgagcatagttcagttatatgatattacacaaataaaatcgttcattgaacattcgaattatgaatcagcatcatacttatataaacttcctcaacagtacaatgaaatagatgtattaataaccgatgcgattgaatcacctggtgtattttcgattaaagaaaacgattcaatcaaagcaatcatattgtcttttgcatacgataaaaataaattcaaagtcataggccctttcgtggctgacaattatgtattatctgtcgatacgtttgaaacgctatttaaagcaatgacttcgaaccaacctgacgatgccgtctttaacttttcttttgaagaaggcattcaacaatacaaaccattaatgaaagttattcaagcaagttataacttcactgactattacatagaagcccgtacaagattagaagaagatatgcaccaaccaaatatcattccttatcacaaagggttttatcgtgctttcagcaaattacacacaactacatttaaatatcaggcacagtcaccacaagatatcattgatagtttagacgaccatcatcatttgtttttatttgttagcgaaggtttacttaaaggttatttataccttgaaattgattcacaacagtcaatcgccgagattaaatacttcagttctcatgtagattaccgtttgaaaggtatcgctttcgagttgcttgcgtatgcattgcaatatgcttttgataattttgatattagaaaagtttattttaaaattcgtaataaaaataataaactcatcgaacgatttaatggtctaggtttccatatcaactatgagtacattaaattcaaattcgaatcacgtaacgtaaaagatcaaacaatccctgaataaaacaccaagcaaataccctacagtacatcattagcatgtattgtgggtttttctactttttgtaaatattgaaaattataagtagttgttttttactattagggcagaatgctttacaataacatgcaagtgtcaattaaggggagcacttgcataaatagtataggagagtgagtagtcttgcaatttcttgatttcttaatcgcacttttacctgctttattctggggaagtgtcgttcttattaatgtgttcgtcggcggtggaccttacaaccaaattcgtggtacgacgctaggcgcactcattgttggattaggtttacttattactggtttcgcaaaattcaataatcctactgtaattattgtcggtcttatttctggtgcattatgggcgtttggacaagcgaatcagcttaaatctattagtttaatcggtgtatcaaatactatgccagtttctacaggtatgcaattagttggtacaacattattcagcgttatctttttaggtgaatggtcttcaatgactcaaattatctttggtttaatcgccatgatattattagttactggtgtagcacttacttcacttaaagctaaaaatgaacgtcaatcagataatcctgaatttaaaaaagcaatgggtattttaattgtatctacagttggatatgtaggtttcgttgtacttggtgacatctttggtgttggtggaactgatgcattgttcttccaatctgtcggtatggcaattggtggctttatcctatccatgaatcataaaacatcacttaaatcaacagcacttaatctattgccaggtgtgatttggggaattggtaacttgttcatgttctattctcaaccaaaagttggtgtagctacaagtttctcattatcacagttacttgttatcgtttcaaccttaggcggtattttcattttaggagaaagaaaagatcgtcgtcagatgacgggtatttgggcaggtattattattatcgtgatagctgctataattctaggtaatttgaaatagaaagttaaatactcatgtaacgtaaaaatgtaatcacttctgaaaataaccattcacttatagaatgattaaaattaattttcgggaattttacgttgaatgttcctctatatgtcctaggaaatacgtggctctaaaaacaaaacgcaataacacatcatgacattaatcatgcgttttaagactttaaaattagcgatacttttaaaatcttgatgatattcatatatcaagtatgcgccatacatatgaagtggatagctgcataacgcactgcattatcaacttgaatgtatgagttgaacaactatgtcataaataaaagcccccttttcacaatatacatttacatattgtggtaaagggggctctcattttctacgaatactaaaatggattttattttcaaatgtgtaaactagacaaacactgcctgatacacgtacaaaataatgatactaataatgattgtcaaattggtcgtcatacctataaatggcagtgttcgatatttaaactgaataccataagaaataattgcaacacctaccgggaacatccaagtgaccaacaatgtcgtcttaatcatatcatctgatactggtaacaacacatatactaacaatcccgcaactaatgctaatccataatgcaaacataaatatttaatagtagcaggtatatactttctttccagagtaaaattcaacatgacacctagcaaaatcattgataacggcatatttgcatgggaaagtatgctaaagaaatcgattgccacatgtggtaaatggatgtgacttatattcaatataaacattacaatgtatgtaacgagtggcactgattgtaataatttcttacctaaatatttaaaatcgaattgatcactaccttcactaaagtagctacctacaaagtaagtaattccaaacatcacaaaggcaccacctatatcagccataacaaaataaataagtcccgttttaggccatatcacttcaattagtggatatgcaaacaatccaatattcatagcaccagtcatcatacctactgatccacgcatgtgattatcatattttctaaaaaaccagacagcaatcattttcgccacaataccatatataatcattaaaattggtaaaatggagaatgacaattttaattctgcactgtttaaattcacaataactaaagatgggagtgtgacattaagaactaatgtagcaatgacttgactatctgttgcttttataaaattaatgcgcttcaaaaagtaaccaagcgcaattaataaaataatcatagtaaattgttctgtcactgttatcccttctttcaataatcttcataatttataactttaacatactccacagatattttagaagtctactgtttcatgctataatctacattaaatgcacttaattatatttcaaaggagtgttatagtatgtctttagaaaaccaactagccgaacttaaatatgattatgttcgtcttcaaggtgacttagaaaaacgggaatctttgaatttagatacttccgcacttgttcgtcaacttaaagatattgaaaatgaaattagaaacgttcgcgctcaaatgcaagattaataatctatcattcaagcaataaatgcttttcgttacataaatttgactagcattgctctgaatacgttatattgatgaattgctttatttttcgctcaattacatctagaatcacaagatgttgtcgtgttatgatttagtgtttcattaacaacatacacgcatatctatcccaacactgctatttatgttttctacgctgctgtactacatgaaccctttgaaacggagaggaagttatcatatgcaattttatctgattttactagcaatactttatctaattgttagttttattagtatttttaaaatggaagttgtatttactcgcattttgagaattattatgggtgtgttgttattattcgtcttagcattaacgatgatgagttttccaaaagagaattggtgggtatttatcgtcttattactcttagtcggtaatgtcgaagtgacaggatttaaaatgcttaaaaaagatctaaaaggtgtaaacatcttgaatttaatgtcattatttatctttgtcatatatttcatcttaaccatcgtattattctaagtaataaacaaaacatgcaataacataattgcaattttattttattatcgtacatgttgaatgccagcattgttttattaacacatcgattaaatcgcacgtgaaataagatctaaaatttcaaattttaaaaagccataaaagtagtcaatatcatgaccgcttttatggcttttatattatctatcgtttagtgaatcgttttttcaaagtaaagagaatttcatatattactggtacaactacaagtgttaataaagttgatgaaattaaaccaccaataactgtagcggctaatcctttcgaaataagaatcgagctatcttgaccaaataacaaaggaactaatgcaccgattgttgcaattgccgtcattaatatcggtctaattctagtaccgcctgcttcgattaatgcttctttcatctccatgccctgctgctcattattaatgacacggtctattaacacaatggcatttgttactacgattccaattaacattagcataccaattaaacttggtactgatattgtttctcctgtgattaatagtgcaataattacaccgataactgtaaatggtaaagagaatagaattgtaaatggtgctaagccacctttaaatgtaataactaggattaaatatacgataatgatcgcagctaacattgcaaaggctaattgtgtcattgcattgttaatatcatctgatgcaccaccgatattaacctttacattattcggtttgtccaaattatttattttagacatcacttgtcgtgttgtgccacccacatctttatttgttactttagcagataccgtcgttgcataatctccttgttcttgcgtcaatttacttggtgtcgttgttttaactaacgtagcgatatttcccaatttaatcgtaccaccagtcggctttttcaaagttatattattcaacttatcttctgaccagtctgtttgcttattttgtttgactttaacatcaacagttttaccattttctttaacagtcgtaactgttttttctggtaagttttcattcaagtgcattgcaagttgacttgcagaaataccattttctgccgctttattttgatcaactttaatttcatactggtcatatgtttgcgataaatcagatttgacattggctagtcctttaacctgtttcattttctgttcaatatcttttacagttgattttatggcatccattgatggaccttttacagtaacctctacagatttattacctgcacctgttcctaaatcttgatttttccactctccaggatgtttaaagccatctgcatgtttaataaccttatccgcttctacatcaaaattaggcgtgtcattatcatattcaaccatgattgccatactatttgtactacccgttggatctactggactactaccaccaactgagtattgaattgtttttacatgctttttctgttttaaatatttttcaacatctttcgcatgattcaacactgcttgctccgtttcaccaggcttcggtgtataagtaatagctaaaaatttatcgtcacctgctgaaataaagctagtgcctagtctcggtcctccaaatacaatagttacaaccaaaattaaagtacttaatataattacaatccacttatgatttagtgaccaatgcaatacttttttataagttgtactaacaacacctaatccttcttgatgttgtttattacgacgtttaacgccttttttaaatagtgttgctgccaaagctggaacgagtgtaattgacactaataacgatgctaataaactaaatgcaatagccaatgcaaaaggtctaaacatttcgcctactgaacctgatacaaacacaagtggtaagaagacgataatagtaactagtgtcgatgacattattggtttaaatacttcagttgtcgcactgataattaaattttcaccttttaattgttcttctgaatctgttaagcgtcgataaatattttcaacaactacaatcgaatcgtctatcacacgtccaatcgctactgttaatgcacctaacgttagtatattcaatgaaacatcactcaatttcagagcaataagcgccataagaagtgataacggaatggatataatagaaattgccgtcgtacgaatgtttcttaaaaacagcaaaataactataattgccacgattgtacctaatgatgctttttcaaccatcgtataaagtgatttctcaacaggctttgcagtatccattgtttttgtgacattaaaatctttattttcatcaacgaatgtatcaattttacgttgtacatctttggctacttgaactgtattggcatcttgagctttagttatttgtagattaaccgcatcctttccattcgttttagaaatagaagtacgcacatcaccaactgtaatatcagctaaatctcctagtttcgctgtcggcataccacttatattatttggtgctgacgcttttgaattttgctgtggtgatgcctgattaacgtctgacatggctgaattttgtttattgtcactttgggattgagattgcccttgtcctcctgcaaacgttaatggaatatttatgtttttaaaagcatcaacagattgatattgaccatcaacaacaattgatttatctttatcaccaaattggaacaatccaagtggtgttgttcttgttgccgtttttagatagttttctacatcatcagcagtcaacccatatttttcaagttcattttgcttaaatttaagggtgatttcacggttcgtctgcccatttaattgcgcattttgcacaccatctaccgtttgtaattttggtattaattgttcattcagtactttcgttacttttttcaagtcattctctttatttgaaaatgaatatgctaaaaccggaaaagcgtccatcgaattacgtcttaattctggttgaccaacttcatctttaaatttaattttatcgatttcttttttaagctgttcttctgctttatccatatctgtattattttcatattcaactgttacaattgaagcattctgtatggattgcgttttaacatttttcacatatgccaatgatcttacttgattgtcaattttactacttatttcatcttgggtactttgtggcgttgcacccggcattgttgttgtaactgaaataactggattttgtacatttggtagtaattctaatttcaatttagcactcgcatatacaccgcccaagacaactaaaacaaccattaaaaagatagcaaacttattccctaaagaaaattgtaatagcttttttatcacagtacttccccctctttcactatattcaaaaatattttactcaaccattctatattgtgtaaaaaaatctgaacgcaaatgacagtcttatgagcgttcagatttcagtcgttaatctattttcgttttaatttacgagatattttaattttagcttttgttaaacgcggtttaacttgctcaattaattggtacaatggctgattcaatacataatcaaattcaccaatcttttcacttaagtatgttccccacacttttttaaatgcccataatccataatgttctgagtctttatctggatcattatctgtaccaccgaaatcgtaagttgttgcaccatgttcacgtgcatacttcatcatcgtatactgcatatgatgatttggtaaaaaatctctaaattcattagaagacgcaccatataagtaatatgattttgagccagcaaacattaatagtgcaccagaaagataaataccttcaggatgttccttttctaaagcttctaggtctcgttttaaatcttcatttttagcaattttattttgcgcatcattaatcatattttgcgcttttttagcttgcttttcagatgtttccatcttctgctgccatttagcaatttcggcatgaagttcattcaattcttgatttactttcgctatattttcttttggatccaactttactaaaaatagttcagcatctccatcttcatgcaacgcatcataaatattttcaaagtaactaatatcacgcgttaagaagccatcgcgttccccagtgattttcattaactcagcaaatgtttttaaaccttctctatcagatcgttccactgtcgtacctcgctttaaagccaagcgcacttttgaacgatttcggcgttcaaaactatttaataactcatcatcatttttatcaattggtgtaatcatagtcatacgtggttggatgtagtcttttgataaaccttctttaaatcctttatgtttaaaaccaagcgctttcaaattttgcaaagcatctgtacctttatcaacttcaacatcaggatcgattttaattgcatacgctttctcagctttagcaatttcttttgcactgtctaacaatgcatttaacgcttctttattactataatcaacaacaaaaccacgtgaaatataacatagcgtatacggtaatttaggtacttttttaaaaagtaactgcgcaacaccctgaacttcaccgtcacgacctacagcgattcttcgcgcgtaccatccagttaatttctttgtttctgcccatttcgttaattgtaataaatctccattggggtgggatttaacaaatgcgtcatgttcctgattagtgatatgcatcttttccatgatttatgatatctccttctatttaacaatacctttaattatacagtttgtatcttatagtgtcgattcagagcttgtgtaagatttgaactcttatttttgaaatgtccatgctccaattaatagtttagcaagttcaaatttacccattttaattgtgaatcattttatatctatgtttcgtgttaaatttaatgttatcgtacaattaatacttttcaactagttacctatacttcaatatactttcatcatctaacacgatattcatttctaaaatgaaccaacttgacttcaatgaataaatttttcctcaagcaaccacattaatgttcatatacaattacccctgttataatgtcaataatctaacaatgaggtgtttgatatgagaacaattattttaagtctatttataattatgaacatcgttgcaatcattatgacattgagtcaacctctcaccgtgaattactttagtttacgggttatacttatctttttcacatttatattatcaatctttttcattttaattaagtcatcacgattaaataatatattaacgattctttccattgtgcttgccattattcatatgggcattctcgctcatagcacttacgtatatttatactaatggttcaaagcgataaatagcacctctgataaaaattgaatatggtgaagttgcttgtgcgtcttttatgataaccgaatgatattttgaaactttaccatcttcaattctaaaataaatatcatcattttttaaaatcaaatctgtgtaatggtcattctcttctacaatgtccatatcaaaccatttcaaccaattcgatactgtttgtgatcggtttttacttttcacaataacagtttcaattgaaaattgtttttgaaaatatttttgcaattttttagtacgcatggaatcactttcttcccattgaataaaaaatggtggcttaatttcatcatcatcctgattcattatataaagcaattgccactttaccttaccatctttatgtgtatctctttccatttgaatcggacctactacttcaacccgctcactttgtagtttatttttaactgcctcaatattatttgtacgcaaacaaatatttttaaagccttgctcatacttctcttgaacaatttgagtagcaaaagcgactccaccttctatcgtttttgccatctttttcaacttttcattattttctacatccagtagctcaatataattttcattgatataacctaatttattgaatgttccatatttatgatgatacccacctgaatgtaattttataacatctcctggaaaactaaaccgatctaactgatctatataatgaatgatgtgatcaaatttcaatatcattagtatccccctatttacatgtaattacgcttattttaacaaagtataaatatttttgctcttaataattatatattgatttctaattgctcccgttttataattactattgttgtaaaaaggttagctaagctaactattttgtcttaggagatgtcactatgctatcacaagaatttttcaatagttttataacaatatatcgcccctatttaaaattagccgagccgattttagaaaaacacaatatatattatggccaatggttaatcttacgcgatatcgctaaacatcagcccactactcttattgaaatttcacatagacgtgcaattgaaaagcctactgcaagaaaaactttaaaagctctaatagaaaatgaccttataacagttgaaaacagtttagaggataaacgacaaaagtttttaactttaacacctaaagggcatgaattatatgagattgtttgtcttgatgtacaaaagctccaacaagcagtagttgccaaaacaaacatttcgcaagatcaaatgcaagaaaccataaatgtgatgaatcaaattcataaaatattattaaaggagacacacaatgactaatcaaggctcattaaataaatcacctattttcaccaaaagttttacaatcaacttttttgtcaactttatcgtatacctatgcatgtatttgttacttgtagttattgctggctatagtaagcaagctttcgacgcttccgattcattagccggattagttgtaggactatttattgtcgggtctttaattggtcgatttgctacaggtaaatttgtaaatcaaatcggacctaaacgattattatttattggtttaattgctttaattatcacgcaattactttattttattgatggatctttagcttttttaatctttgtacgtctcataaacggtatcgcaactgcagttgtgacaactgcaacaggtactattgcggcatacgttacccctgttaatagaaaaagtgaaggcatcagtttattttccttaagtttagtattaggtacagcgattggcccatttctaggcatgttacttattacaaaatacccaattgatttactgtttattatttgtgtcatattaggcatactcggactcattatctcattatttataaaagttgatttcgaagtaacaaataataaaactgaaactaatgtcattgataaaccaagatttagtattcatcaatttattgcaaaagaggccattcctgttgctgtaattatgcttttaattggcgttacctatgcgtccatcctaacttatttacaagcatttgctttagagcgacacctagtaactgcagcaagctatttctttatttgctatgctatagcatcgttaattactagacctattgctggtagattgatggatgataaaaatgaaaatattattgtctacccagcatttatcatgcttttcctttcatttgtatgcttaatttcaagctatcaaagctggttaatattacttgctggtgcttgcctaggtttagggtatggaaatttatcatctgcaatgcaatctattgcgataaaagtctcacctccgattaaatatggtatcgcgacatctactttttacgttggtctagatgcaggtgtcggcttcggtccatcattccttgggttatttactcatatgttttcatatagtgaaatcttcggctttatggccgctttagcaatcattactatgcttgtttacttcttaattcatggacgtcatgtaactagaaatgccatgaactaaatatttatattcaaaattaaaaagcatgccaatctctattcatcatttgtctgtccccaagacgcaattatgatgtactgattggcatgctttttaagtttttagtttgtaacgcttaacacttctatttctttagtaattttatctaacaatttcttttgagaagtactatagaaatagaatacttgtctttcatccgtttcagaacgcaatttagaaataagctcttttttatagattttacggataatcacatcgattttacttgtatcccatagcatttcaaaatgtaatgtatctctcaattctttaccgctaatcttttcagcttcatacactttaaaaagtactacaaattcttcaattgaaatcttatgtgttgtttttaaccagtgctttaactgacttaactccctttctgcttctataaaacgttgaactttattactcataatatgatgcctcctatgtttcttcttagatgtttgtaattcatattattatacaattacttaaatttattatatatcaaacttagcattttatctattacaaatattaaattgctggctatatcttgtttagatttatatcttttggacaacttgttgtttattcgacaacatttatacctaaaaaagatatattacaactcaatggcatggagtgtgacatcaatgttaaagaaccactaaagatttattatgtagtgattcttaagagtgggatagaaatgatattctcataaaatttatttcgttgttccccaacttgcacattattgtaagctgacttttcgtcaccttctatgttggggccccgccaacttgcacattattgtaagctgactttctgtcagcttctgtgttggggccccgccaacttgtaaaaactttaaaaacgatcatttctattaaatctggcatagatatgaccgtttttactttaataaataatattgtattttagggagtaagacagaaatattaaaacatctctaatgatttaatatgtagtggtccctacacattaaccaccaatataattcatgtttatctttttacgttgacgattggcaactgtttgagcagttctctcatctgaatatcgatcatctcttatttgccataaagctttaaattgttcttttaattcttcgtcggtcacgccagaacgaataaacgctttaacgttaaatccatcgacagttgcaaataaacatccgtaaaacttcccatctgatgacagccttgcgcgtgtacatgtagaacaaaatgattgtgaaacacttgtaatcaaaccaaattgaacaccattatccttatggcgataatattttgctacttccccaaaatattttggttctacaggatcgatttcaaagtgctgctctatcattgtaagcatttcatctttagttacaactttactgaaatcccatccattatcattaccaacatccataaattctataaatcgaatctctatatgtttatctttaaaatattcaagcattggtatgatttgatcatcgttaatacctttttgtataacaacatttacttttacattcaaaccaatagacgtcgcgtaatcaatttgttctaaaatcgtagtcgctttaatattacgattattgattgattgaaatagcgtatcatcaatagcatccaaactgacattaattctgcgcagcccagcatcatataacttttgtccatgcttttttaataacaaaccatttgtagtcaaaccaatatcttcaataccatcgatttgatttaatttagctataagtacatctaaatcccgtcgcatcaatggttctccacctgtaatgcgtattttttttacacctaattctgcatataccttagcgattctagccatttcatcaaacgttaaaagttcatttttaggtaaaaatacgaaatcatctccaaatacctctttaggcatgcaataatcacacctaaagttacaccgatctgtcacagataaccgtaagtcacggatgggacgtcctagtttatcttttatttgttctaccatttgtggacctcctaacagcttacaatttttgaattaaagcgtccaaatcatgctgataatttatatttttgtaccaatatgagggcgcatctacatcccttacatccaaataatccgttgataattcatgatatacatttttaaaactgtaattatcagaatgtagtgctttagttatagcgcctaatgcattcggactataaaatgcaattgttggaataaaacgtccatcttctttaaaagctgcgacatctaaatgattttcaataagatgagaaactaaaaactgatacaacgtgcttacagctttaccagtaatcattggtgtatcaacagaaacgacaaaaaacaattcttcttcaggatgttgcttcatgattgtataaattcctgctaatggacctttatcattatgattctcatcatctataacaacatttggatatttaaattgcgttgccaattgcgcatttgtactaataataatttcattgaacatatttgttgattctaatgtcttaattactctactataaaaggtctcaccgttcacttccgcaaaagctttgggcttaccaaatcgcactgaatgaccacctgcaagaattattgctttcatgctcccttaacctccactaaccggtggaattaatgcaacagtatcattaggttgaatgaaatccgatttttgtacaaattcctcatttacagcaacttgaaactttttattattgatttgcggataacgttcaaacaataaatcttcaaattgttgtacagtcaatgcttgttcaagcacaatatcttcctgtgctttttgtaatatatctttaatttctgcgaagtaaagtaccttcatctctcttattcctccctcttcgcttcttcataattccctttttgatgcccttgccattttgaaccatcttcccaaatttcttttttccaaatcggaacaatttcttttatacgctcaattgcatattcatttgctcgataggcatctttacgatgcggtgaagaaaccgcaattaatacagcgatatctgaaatttgtaatggccctattctatgaacaatactcgttatcgttccaggccatttttcatttatttcatctccaatttgtgccaatttcttttcagccattggaatatacgcttcatattctaaatattccgttttgacgcctttagtccattcgcgaacatgaccggtaaaaacaactactgcaccttgatattcatttatagtgaattcacgatattgttctgtttgtatcggttctgtcacgatttcaaattgtttcattcatttcaatcctctatgttaattgtgtatcacaatcatttttaattttatttaataaccattgctcaaatgctgtaaaatcttcatgctcccttacattaatgctataacaaacattcgacaattgttgtaatacttgcaactcttcttcatttcgatagactacgactttttcaaaatcagcatttttaaagccttcaactaatacgatattggtgtcaattgtaacagatttttcaataatttgagtaagattttgattatctacacgtgttacagtttgctgatattgaaaaccttgtacaatactttgatctgcccccgcttcaaaatgcttcatgtgatcgacgtctgaatcctgtaattgaatatcttccttaccatgcccatgatgtttaatagtagcaactgtataaccatgtgactttaagaaagagacaatatgcctcatcaatgttgtcttaccagactttttgtaacctacaatttgtaaaatcataaaagaagttcctcttcagcagcgtcagattcagtcaatataatatctactgtatgccccgctttaaaaccacgtgaccctcctggtaacatgaccatacagttagcatgtgcaatcgctacaaccgcacctgatttattgaatcctgaaggtactacagtagctccagcacttgttaacgttgctttagcacgtataaatcgtgtgaatgggtttgccttggtaaaatcttccattaatgttgctttaattatttgcgggaagacttctagtgcgccacacatatgtttaacagctggtttcacaaatagttcaaatcctgtaaaacaagctgatggatttccagataatccaaacaaatactttccatctacaaatgcaaccgttgttacgctaccaggacgcattgctactttattaaataacacttccgcctttacagccttataaatctcaggtaaatagtcaaaatctccaacagaaactccgcccgttgtaataacgatatcatgtttttccatagcttctttaacgacttggatgccactatctaaatcatctttttgtgttttgtaaataccaacttcaagacctaatttttctgctaaggcacgaatcattgggccattagagttacgaatttttccatcttctaatacatcattaacatctaataattcgcttcctgttgcaataacagcgacactcggttgcttaataactttaacctctgcatagccatatgttgcaaggaccgcgatagcccctggattaattacttgtcctttttttagaacaacatcgcctgtcgttgtttcttcaccttttaaagatatattttcattttttgaaaatggtttacgaattgtaaatgtatcttctagttcaatcgtttgttcaaacataacaacagcatctgcgccattaggtatttgtgctccagtcataatacgcaccgcttcgtgatccccaactaatttatcagaaactgaacctgcaccaatatgatcaatcactttaaactcaatgcgattctgaccacttgccccttgtgaatcaacactgcgaattgcaaaaccatcataaggtgatttatcaaaccttggtatatcataagtagctacaatatcttctgctaagatatgatttagacttttttcaagtgctaccgtaattgccggcattgaactctgctgattaacgatacgttgaattgcttctttaactgggattgggtttcttttttctactaccattaaaaatcatctccaaaacttttattttttcatgatatactagatgcactaggaggggtaaaatgactgagtttactcatattaatcaacaaggccacgccaaaatggtcgatgtatcagacaaacaaattacaaaaagaactgctgtcgctcattcaagcattactgtaaataaaactatttttaagcagatttctaataacaccaataccaaaggcaatgtattgaacactgctcaaatcgctggtattatggctgccaaaaatacatcaacaattattccgatgtgccatccattaccattgactggcatagatgttcacttcagctgggatgaaacaaatgcacccctttatactttaaacattcaaacaactgtctctacaactggcaaaaccggtgttgaaatggaagctttaaccgctgcatcagcaacggctttaaccatttacgacatgacgaaagcagttgataaaggtatgattattggcgaaacctaccttgaaagcaagtctggcggtaaatctggagattttcaacgccaatcaaatcaataaattattttgtaagctcatgaatcagatgatttaattctggtttaatgagcttttctaatgctaatttaactgcgcctgttgatcctggaatcgaaaatatcaatttattattaactgtacctgctacagcacgagacaataatgcacgcgtgccaacatcttcaacataactcaaatatctaaacaattccccaaagccttctatctctttagttaaaagtggttttactgcttcaatcgtcacatcacgttgtgcaatacctgttccaccagtcgtaatgatgacatcaatatcttcttctaaccacttcttcacctgcgtcgtgatggctactttttcatctttcacaattgtataatgtgcgtcactcacttcaacgtcatctgcttgtaatagttggcgcacgcattgaccacctttatctgtatcaaagtctctagtatctgataccgttagtacggctgctttaactgtacgattcaatttaacgttttgatgttcgcccataatattacactccttttgtcttatctttttttatccaaacaataaattcattagatgtgtggcatctgatgtgcgtgtcatgccatgtattaaaaaccttccacctttaaaagcaacaatgcggtgtcctttaaattcaaacataaccatatacgaattactgcgataatttagttgatgttgttttaaaaattgaacaagaatgtcgtgtgtaattgatgcattttcatactgtacagtgtctctaccacacaatgttgcataacgttgttcattcttgtttaaatacggataacttggtacatctccacaagttgtacagtctgaacgttgcattttactgaaaccaaatgaataatgactaccatcccaaatatcgccataagttatttttgtgtcaattggttgttccgttaatactttcatcgcatctcttaattgtaaacttgttgccatcgtcacggcaggttgaatgacccctaccgtatcacatgttaaatttaatgctggcaattgtggtaccaaacagttaaagcaaggtgttttaccaggtataaatgcagcttctgtatatgtactctgtacaacaccaccataaatccaaggtatacgatgtttatatgcaaaatcatcaatcagttgtcgtgtttcaaagttatcggttgcatcaataataacgtcaacgtcctgtccatgtgtttccaaaaaataataatccacatgggcaatataatcatcaatatcaacatcactacgtaacgctagcaaatgctttttagctgcaaccaccttaggcatcattttcaaagcatcttcttcagtaaacaatgtttgtctttgtaaattactaaattcaatataatctctatcaacaatgattagtttagcaatgcctgctctaacaagtccttcagccacatgtgtacctaatgcgcccataccaataatcaacgcacatttttgatttattttgctttgacctatttcacctatttgtttaaataaaatttgccttgaataacgttcttgactcacattaagttatcctttctttttatcattactttcattatatgacgcgcgtcaatgtctctcaaaaaaactgcccctaaaaaagagtttaaaacatcattaaaatgctgatagaagcattcacttctacaattttaaatacgttctaaactctttaatggcaaataaatgattacccaattgtaataatttcatgagccatttgttctgcttcatagtttgaatgtgtcacaaatatgattggtatttgccattcgttgaaaatacgtttaactaatgtaatactctcatcttttgtagtatcatccaaactagaaaaaggttcatctaataaaattaaatctggtttcgtgctaagtgcacgtgcaagtgctacacgttgtgcctctccacctgacaatgtcataggatattgtttcatcaaatgatcaatgtttaaagtttgaattaattgatcgatgtgttcagatggttcagccataaaagtaatatttttatagaccgtcatattaggaaacaattggtagtcttgaaacagatatccaatacgtcgttgttgaattttaacattcacgttttttgccgtatcagtaagtaattgcccattcacttcgataatagcttcatctgctttacgtaatccggcaatcatatttaaaacagtagttttaccaatgccagatggaccacgaactgcataaatttttggttcagtatcatctatattgatgcgaattaaagtgttctttaattgatatttcacattgattttaagcatctagtcgacctccttatatttatctttattcaataaattaattgtagatataaccacaatagagaatgcgactagcactaatacccataaccacgcttcattttctctaccttgttccactaagaagtatatttctaaaggtagtgtattcgttttatttggaatatatcctgcaaccattaatgtagcaccaaactcacctaatgcacgagcaaaactcatcattatacctgctaaaatagagcgtttagctaatggtaaaattaatttgaggaaaattttcgtttcacttgctcccatcgttctagctgtattaatcattttcgtgtctatacctctgaagccttgcacagtatgttgatacattagtggaaaactaacaatgacagatgctatcacagcacctgtcaaagtgaacactacaggtaaatgtagtacattcgcaaagaattgaccgattggtcctcttggcgagaagatgattaatagaataaaacctaataccgttggcggcaaaacaataggtaatatcaataaactttccaatactttaacccacgaacccttacgatgatacaaccatttagatataaaaatacctaaaaccgttacaataatcgtactgattacagcaactcgtattgatatccaaaaaggtgttaagtcaggcatggattacaactccttatgctgcaaagtggtattcttttaatatttctttagctttatctgattttaagaattccatccactcttttgctaatttactatctgatgtagcaccagcttcgtatgtgattggtttcttaagttctacttctttaattacttttacagtatcaatttttttgttttgtttatataagtcagttttatacacaaaaccttgtttcgcattacccttttcaacataatttaatacttgttttacatctttagcataaacgattttactttcgacttctttaaataagttattgttatctaaatactgtttcgcatattttcctgctggtacagttttcacttcacctaatgctaatttatcattgtcttttaagtcttttactgaagtgtaatttgaatctttatcaccaattaatactagactatttttcgcatatttatatgtatcatgcgctttattcttgtcttttaatgcatctacatctttagtatttgcagacataaatacgtcaacaggtgcgcctgattcaatttgttttcttaatgcccctgatccaccatagttaaatttaatatcagcatttttatgctcttttttaaattctgaagctaatttcttggttacatctgttaaacttgctgccgctgcaacttgaatctcttgtttcttaccattgtctgcgtcatcttttttactttcattattatcgttagaattagagcaaccagctaatactaaaaataatgccattacaatagctataaaacgtttcattttcattgagtgaacccccttttttaataatatttacattttcattatacacttactattatatttgaaaagaaccgttgcctgtttatatattgattcaaacaattgtcaaatttgcataagattgatatttattaattgatcccctagtatgtatactctcgaattcaatttaaatcaaacagattgctcgctattattttttataaatcaaatttcaaacttaagcaaatatgttaaaattttaagcaaattgctttaaaataaagtttaagctaattaaaggggttagataatgaacaaagatgtatctttaggtcaaccaattgttagatatgaagatggaaaattattcaatacaacagatcaatatgtgacagaatttccacttacaattatggtgaatggtgaagaatttgcgactgttatatgcagtccaacaaaccttgaggagttagtcattggatttctggcttcggaaggtgccattttaaagcgagatgaattaaaatctgtgctgattgatgatagtaaaggttttgcccatgttgaacttaataaagatttaggcgatcgctttcaatattccacaaaacgaatgattgcatcttgttgtggaaagagtcgtgagttttattttcaaaatgatgctgctatcgctaaaacatctatgtctaaaatcactttaactccaatgcaaattattaacatgatgactcgattacaaagtgcaagtcatatttaccaagaaacaggtggcttacataatgctgctataagcgatggtttgacattttttgtacatcgacaagacattggtagacataacgctctagataaattatatggattttgtattcagcgacatattactgtccgagataaagtattaatttttagtggacgtatttcatcagaaattttaattaaagccgcaaaaattggtgttggcgtcattttatctaaatcagctccgacaacgcttgctgtaaccttagctaatgacctaaatattacggcagtaggatttattcgaaatggtggctttaatatatatagtcatccagaacgtatcatcgactctgaacaataacatattcattatagtgtgtcataatgaacgatattctacatgaatcaacaatataaaagcactatttttataagtataagtagctcaaaacaatttaaaaagcagtaagttgatttctactcgaaaccagcttactgcttttttattctaatacaaacctatcatcaatcgttaatttccaatatcttcttttaatatttgataacaaaatgattggtaaacataaccttgctttgcatacatatcttttgctgtatcttcaccatctgcaactaatatgattggtttgtgattttttgatatggcgtattcagctatcaacgattgaattgtagatccaattccttggtgccgaaattgttctaatacaccaaatccatctaattcaatgtaattttcactttcaatgacatctacaacgccaataggttcattatttaaataagctactaagcgtttaatcacatctttttgataatgttcccttaccatttcttcatgtgcatctgcatagtcttttccaaatggcaaactaaactgatatgcaacttttaaataggcatctatatgcgactcgtcaacgatggcaatttcaacgtcagagttacgcggcaaattggcaagcgcatcactttctatggcatacaattccataatacctagttcaaaattcatatctttaaacatagccatccaatgattatcaagttgttcattttccgggaaactaaacgcataatgatttgaaccttgatttgtatgtaattgatgttgacgttctaagtctttcagccatcgctcttgggtaggcgtctttttatatatccatgtgttgcttgtgtatcgttgtggaaaagaaggcgttaaataaattaactgctcgtcgtcattttcaaatatagtgccgttacaatatatatctgacatacttatactagccattgacacctactcctttcacttttataaatttcaaagcaacttattcaattactttattatcttaacttaaatatgattattttaatcccataatttgacgaaactgcgagtgattaagtaaagctgtaccaatcaaacttgctacaattgcttttaatatatcaccaggcaaataagctaatgaaattgaaatagctttcgtaaatggtatgttaataatcatgcccataatcaatgtaccaataacatctaatgctataacaccaaaaactaaaataccaacgaataaaatccagaaattaatttcattgatgaatctatcacgaatcgcaccaatcatgaatgctacaactggatataatagtaaaaaccctgctgaaggacctgcgaatacaccaatgccaccgcgaccgcctgataacagtggcaagccagcaactactaataataaaaagacgataacacttaatgtgccatatttacgtcctaaaatcacacctgctaagaaaataccaatgttttgaagtacaattggtactgaagaaaatggtagtggaattaccggtaccaatcctaaaatagcgataatcgctgtcattaaagctgtatatactaactgttttgttgtcattttttacttcctttcgtatttcatgaccattattatagcaccattgtaaactttaagaaacgaaaagtttacaataagttgttctatataaattaaaaccttaattattctacacagctgttaatttacttttttagcaagtgcagttatataatcaaaaaatgcgttgttatctacatgatttatgacattaattttgcgcccatctttacactcaaatgtcttaccttgacttggtccataacttattacatcgacttttttctcaattgaatgaaccaagtccttgttaccaatataagcagtcgttaaaacatcccataaaaagtaagtagaatttgttataaagtgtgttaatggtggtaccgctgcataacttactcctaaaaaatcaatgcccgtatattggcgttcattcgcccatctttgtctaacatctaacgttagcggtacttgattcgtactttctaaagcaaccatatcaatctctatatcgctatcaaaaacaattttaaccgcttctggatcccaatatgcattccattctgcagaaccatcatgctcaggttcttcaacatttccttttggtaaaaaggtaccacccatccaaactaatttttctatatactgaacgatagatgaatctttttgtagtgcttttgctaaatctgtaagcgggcctgtaaataataatgttactttttctgattgtctctttaaagtttgaataatgtcttcaaaggcttctttgtcgctcacatttgaagcaacatgtttgactggctcatttaaaattggcaatgcgtccataaaaaaggcatgcatacgccattctttaggaaatggattttttcctcgttcatatgatggcgcaacttgaatatcttcatttgaaaaacgattaataatttttactgatgcgctcaaagatggctctaaataacaatcagcaccaattgtactgacccctatcaattgaacgttttccatttgtaataataaaaatagagacactaaatcatctacaccaccatcatggttaaaataaactttcttagtcactcgaaatcccccttacatttcattttccattaacaatattatgttttataaaacgttgttatatatctttctacaaaatcataacattctgttgtaatccttttaaacctcttcttttattgatagccattccctgatatcccttccataaagtatgaactaatataattatgatataacttattaataaagagatacattgagctattttctcaggtatactactttagctataataatactaatctatcattaattaaattgaacgataacaacggcacttattattaaaaaaaatacaaatatctaactttctagctataaaaataagagcctaatacaatatcaaaagattgatatgtttcagactctcatttcactaacttatatagctgaattattttgcagctttaattaatttttcttttaaatctttacgcatgaaatctaatgtataaggatcgttgtaccagtatgtaccagcatcaactttaacaatatgtccttctttagtagctttcaaattcttccacatgtttgttgattcatatcctggtgtaggtttaccttcacttgtactcacaatgtaatcaccagcatatttttcaatttcttcttgtttcacttcagcccaacctgcttttgcagttaacttttgttgttctggttgcatttttaaaccaaatgcttgatataatacttctccaccacgaccccagttatcgccgtaagtgtataattttttatcaaattcatcaaacaatgacactgttgcatcttgtccaattgcttttttaatttctttaccgtctttagcagttgtttcttcccaatctttcttccaagcttttactttatcttctttaccaacaattttccctaacatttcttgttgttctaaatatttatgcttattatagtcaacaactactgttggtgctactttttgatattttttaatatctttgtcagtagagtatacaataattaaatctggcttttctttagcaactttttctacatcgccatcaccaatttttgtaacacctttaaatttatcttttaatactttgctttgatcgacttgttgatttacagctacaatgtttgcacctaattttttaagtccaccagcatatgttggcgcaactactgcaatgcgtttagggtctttcggaatatctaccgttttgccatcgtccattttataagatttagtttcagctttgttatttttttcaccttggttcccacacgcagctaacactaataacataattattaatggtaataatagttttttcataatttcctcctattgaaaatgattatcaattattccaaaattatacaagattgcatatacatttacaatagctagtgctatttatttttttattttcgcaaaaaatttaacaaaatatcttaacatccctataaatccccacaaaaaagggtaaatccgaacgtcaaatttcatctctttatgccaatcaacgatcgatttacctttttaaatttaaaatgtatctgtaatactcttagcaatatttgtatatgctgcatcttccataggtggattgtgtaatcctgcacgcatgtcacgatagtaacgttgtaatggtcgattcatttctaagcttttagcaccaactattctcatcgctaaatcaatcacttcaagcccttgattcattaccatcactttactcgcacttgttgaatttcttatctgactgtcatctttatattgttgatagccttttgctgtactccataaaaattgtctcgcacataacaatagcgtttccattttccctaaattttgttgcacagttggcaatgttgcaatcgttccttcaatactattagggctatgttggattgcaaagtctacagcataatttctagcagcttgtgctatacctaaataacagcttggtatatgcaatatccaaccatttggcgctttacttttctctgtttccactaaatgttttaatggtacttttacatcatttaatattaaatcatgactttctgtcgctcgcatacctaatacgtcccaattatcggcaatttcaacaccaggcaaattcctgtccactaagaaaaaaccaacaccttctaattcttctatataagcagcaacaataatatgtgttagtgctttactcattgatgtatatgtcttcacaccatttaaaatatacccatcatcagctttaacagcatgtgtacttggtcttccccctcttgttggactacccatttcagcttcactaactgctctattaactaatgcaccattattaatttcaacagcaaattgctccaacatatcttgagaccataatttctgttcataaatttgtcctacgacactcacatgccaaccaatagataatgctgtggcaccatcaagttcgcctaaaaatgattgcaaaataaccatgtcttctatggtcgcaccttcaccaccatatgcttttggtaacgttaattttccataaccttctttaattaaccattcaatatttttatatggaaattggctatgttgatcattatattcagctttagccttaaatgtatctctaattactttgaatttttcaatccattttctttgaatttccgttgttattaaaaaggaattatccatatcattcatattagtcaccccacacaacacacaatataaattatttattcctagtttaacactcgactttaaaaataaaaaggaacgtgctgtgaacaattaaaagaaaactgataattcgattaagtatgcacttaattttatccataaaaatacaccttaaactatacaattcgctgtatagtttaaggtgatattcaaacaatattaggtttgatttaactatcaagcatctactttgtcatgtttaataccagcaaataataaaatccatgtcacaataataaatggcaatgttaatgcaggtaagccaaacggttcaagcaatgttgttgtacctagttgcaccactactgttaataacacacctaaaaaagtcgaaatataagggttaatcgctgttttaaatgtatatcctagtgcgattgccattaatacaaagttataaccgaataatccctgattaatatcatcataattaccacctaatagagctacaatgataaagcttaacaaactagctataacagctaagagtgctgcttttcttgatgctatcaatatgccgattaaaatacatacgccaccaattacactcgcttcgataaatacttgactgaatccttcaaataatgactgaatgaaatgtattctatcattgttgctaaaattaaccgtttcaatgttttgaggcattaactttaacgatgtatctacaaatttaacctgtcctgaaagtaaaattgtaaaccaagtcacaatgacaaaaggcatcgtcagcatcggaactttatatggtcttaaaacttctctcactgcagcagcaactggtaacgttaataaagttgctatcattgttataacaatatctaatcctgacttatctaaaaagattgttaacgcaatggcagttaacactggattaaatccggctaacccatcattaatctctgcttcactataattaatgtaacgtgcaaatgcataagctatgatactacctacaatagccgctaatccaattgtccaatcggctacaaataatcctattaagataaataatcctgtccatttattactaattaacacaacctgagaaatatttttcaaaagtacatctattatcttcaaatctttcacctttcctttgaatcattactcattaatatactactattctatgaaaagttatattaaaaactattttggtttttacataaatatattccactatttgttttcgattagattgtttgcttcaatttcggatatgctaaaaatataattttctaattacacattgaactttgtatattacttgtttatcacaacaattaggattaatataaattttgtaaattgtatctaatatgaaattgggggttttaatttgcattttacacaacgagagcaagacaaattaatgattgtagtggcggcggaagttgcacgtcgtcgtaaagcacgtggtttgaaactaaatcatcctgaggcattagctttaatcagcgatgaattattagaaggtgcacgcgatggtaagaccgttgcagagttaatgagttatggtagacaaattctaaacaaagaagatgtcatggatggtgtcgaacacatgattacagatatcgaaatcgaggctacgttccccgatggtactaagttaatcacagtacatcaccctattgtttaaaggaggcagtcaaatgatacctggagaaattattacaaaaagtacagaggttgaaattaataaccatcatcctgaaacagttatcgaagttgaaaatacaggagatcgaccaattcaagtgggctcacattttcatttttatgaagcaaatgcagcattagatttcgaacgtgaaatggcatatggaaaacatttagatatcccagctggagcagctgtccgatttgaacctggggataaaaaagaagttcaattagttgaatatgctggcaaacgtaaaatttttggttttcgtggtatggtcaatggtcctatcgatgagtcacgtgtctatcgcccaactgatgaaaatgatgaatatgcaggtgtattcggagataacggtgctgaaaacgtgaataaaaaaggaggaaaaagatcatgagctttaaaatgacgcaaaatcaatatacgagcttatacggtccaactgttggagattccattcgtttaggtgatacgaatctatttgctcaaatagaaaaagactatgcggtttatggtgaagaagctacttttggtggtggtaaatctattagagacggtatggcgcaaaatcctcgtgtaacacgtgatgacgtgaacgttgcagaccttgtcatttctaatgccgttattatcgattacgataaagtggttaaagctgatataggcattaaaaatggttatattttcgccataggtaatgccggcaacccagatataatggataatgtcgacattattataggttcaacaacagatatcattgccgctgaaggtaaaatcgtcactgctggtggtattgatactcatgttcattttattaatcctgaacaagcagaggtcgcattagaaagtggcattacgactcatattggtggtggtactggtgcttcagaaggttctaaagcaacaactgtaactccaggtccatggcatattcatagaatgttagaagctgccgaaggtttaccgattaatgtcggttttacaggtaaaggacaagcaacaaatccaactgcactcattgaacaaatcaatgccggagcaattggattaaaagtacatgaagactggggtgcaacaccatctgctttgagtcatgcattagatgttgctgatgaatttgatgttcaaattgcattacatgcagatactttaaatgaagcaggatttatggaagacacaatggctgctgttaaagaccgtgtacttcatatgtaccatactgaaggtgctggtggcggtcatgcgcctgatttaattaaatcagctgcattttcaaatattttaccttcatctacaaatccaactttgccttatacacataatactgtagatgaacatttagatatggtaatgattactcaccatttaaatgcggctattcctgaagatatcgcattcgcagattcacgtattcgtaaagaaacgattgcagcagaagatgttctgcaagatatgggtgtattcagtatgattagttccgattcacaagcaatgggccgtgtaggtgaagtaattacacgaacatggcaagtagcacatcgcatgaaagaacaacgtggtcctttagatggtgattttgaacataatgataataatcgcatcaaacgttatatcgctaaatatacaattaacccagcaattacacatggtatttctgaatatgtaggatctatcgagccgggcaaactagctgacattgtcttatgggacccaattttctttggggttaaacctgaattagttgtaaagggcggattaattaactctgccgtaaatggcgatgcaaatggttctatacctacatctgaaccgatgaagtaccgtaaaatgtatggtcaatacggcggaaaccttacaagtacgtcaatgacattcgtgtctaaaactgcttatgaaaatggtatcaatcgtgcattaaatttaaaacgcatggtgcgtccagttaaaaatattagacaattatctaaagcagatatgaaaaataacagcgcaacacctaaattagacgttgatccacaaacatatgaagtatatgtagatggagaaaaaattacaagtaatgcagcaactgagttaccattaactcaaagatacttcttattctaggaggaacatagaatgattgttgaagaaatccaaggcaatattgccaatttgtcaaattcagaaaaacaaaagcacgtcgaaaaagtataccttgaaaattcagatcttgttaaacgtattcaaagagtcgttacagaccatggcactgaaataggcattcgtttaaaacaacctattgacttacaatatggagatattttatacgcagatgaccataatatgattattgtggatgttaattcagaagatcttttagtgattcaaccaagaacattgcaagaaatgggagatatagcccatcaattaggaaatcgtcatttgccagcacaatttacagagactgaaatgctagtacaatatgattatttagttgaagatttattaaaaagtttaggcatcccatatgttcgagaagaccgtaaagttaataaggctttcagacatatagggcattctcatgattgatcatacacacttaagattatttcagttctgtgattcacagtttccaacaggtgctttcagtcattcatttggtcttgaaacatatattcaacgaaatataattcatgacgatcatacttttattgcttggttaaaaatgtttttacaagagcaacttacctattctgatggtttagccatgcgtttagtttatgatgcattggaaaatgatgatacacaaaaagtattacacatagataaactgatgtttgttcaaaacttacctaaagaaacacgtgttggtgcaaaacaaatggggactcgcatggttaaattggctttagaactttataatagcccatggattgcttggtatcatcaacaaatgcaagataagaaagcaaagttaaatccagctatttgttttactatgctaggccatcatttaggtgtagatattgaaacgattattgattactatttatatcaaaatgtttcaagtttaactcaaaatgctgttcgtgctattccacttggacaaactgctggtcaaaagatagttactcacatgattccttatatagaaggaacaagaaagcagattttcgaattaaaagaagcagattttggcatgacagcgcctggtttagaactaaatcaaatggcgcatgagaacgtcaatgttagaattttcatatcataggaggttataattgtggcaaatccgattaaaattggtattggtggtcctgtaggtgcaggtaaaacacaattaattgaaaaagttgtaaaacgtctttcaaaagaaatgagtatcggcgttattacaaatgatatatatacaaaagaagacgaaaagatattagtaaattcaggagttctacctgaaagtcgtatcattggtgttgaaactggtggatgtcctcatactgcgattcgtgaagatgcatctatgaactttgcagcaatagacgaattattagaacgtcatgacgatatagaactaattttcatagaatctggtggcgataacttagcagcaacatttagcccagaacttgttgacttttcaatatatattatcgatgttgctcaaggtgaaaagattccacgtaaaggtggtcaaggtatgattaagtcagatttctttataattaacaaaactgatttagctccctatgtaggtgcatcattagaacaaatggctgaagatactaaagtatttcgtggtaaacgtccatttacttttactaacttaaaaactgacgaaggtttggatgaagttatcgattggattgaacgcgacactttactcaaaggattatcataatggatgaacaacaatggactgggcaacttgatttaacagtgttttttgatggcaaccgatcagtatcaagagatattttctttgaaaaagcacttaaagtgatacgtccagtttatctaaatcaatctaccattcctacattttatatagtaaatgtaggtggtggttatttagatggagatcgttaccgtatgaatgtgaatgtcgaagataacgctaaagtgacattgacatctcaaggtgcaacaaaaatatacaagacaccttccaatcatgttgagcagtatcaaacttttaatttgaaagataacgcatatttagaatatgtcgctgatccaatcatcgcatatgaaaatgctaaattttatcaacacaatacgttcaatctcaataattctagttcattattttatactgatattttaactcctggttattcaaaaactggcgaagccttcaagtatcaatatatgcatttaataaatgaaatttatattgaagatgagttagtcacatatgataatttattattgaatcctaataaacaatcgatcaatgaaataggttatatggaacattactctcattacggctctgcttacttcatacatgaagatgttaaccaaaaactaatcgattcagtttatgaaaccattagttcttatagcaatacattcgattgtcgtgttgctatttctcaattgcctacacatggttttgcagttagaatttttgcttatcgcacacaaattatagagaaaatacttggaatcatccaaagctatatcgcagaaaatatttatgatcgtaaacttgattttctaagaaaatattaaaataaaaagactagtgtaccttgtttcaagcttaataagctgaaataaggtatggctagtctttaactttaattaaagcatcttcaatatttaaattttaagttaattttatgtcccaatgctgaataaataacttcgttttaataaattgttatcgttcaatgttattaaacgcaattaaccttgatttaatttttaatgtattcttctaattctgaaatcagtttttgaatatttgctttttgtgtatctgtaacataaacaataactgttctttcgtcttgtaaacttcttttctttgataacaattttaaatcttttagcttttgtaaagctttagttaaatagtaaggtttgaactctgagcacttagcaatctctttagatgagatttcgttagactcacttcttaaaatatgatttaaaatataaatttcttcatagttcaaattgaacttcttttttgtatctctgaaaaacttcttaacttgaaatgttgcgttgactaaatcattaatgtcattaattttactcattattaaaccactcctctgatgcacatcttgttgtagcaaggttcacatgtaatttattaaatcgaaactctatccaactatgttataaagttcattctaaacaaataagtataaaaattcaatatttttattactagaatatggttaaatacatttatttcttataataatttgatgtttaagatattttgccaaattgaaaattattagtctgaatattttgtatcttaactgatatgtaaacttttaaaattttaatctatatcaacgtgtttgatttgatattttttatattaattggatggcttgctcacaaaatttataaaatataaaaaaagaagagctttaaatcataacgcatgccatttatctttaaatgcaatgagttatcattcaaactcttcttatcaacctacatacattgacattatactatcatatgttgttttacatattcaacaaacatttcaacgttatcacttttaatatcatgcattgggacattaccaatattaaatttgaacattatagtttgaccatcataatctatcttctctatttcattataactaatacttctataataaaattggccattcatatctacattcataattaatctttcatttgttgctataaatgccccttcaaattcattctcaccttgaactttatactcaattattcctagcactgacggaccctttttttcagttggaaataaatcatttggattcacattatctaaaatcataatatccctcccacttaaaactataaactattcttcataggtatgtgaaatacaagtgattaactatttattattaagcttaacttgtattcccttttcaagataattataacatgcttgaataagcatagtgactttagaaaacttttctcgcttgattgttacaataacacgcctttcatctaattcacatctctcttttttaactaatcccttcaaaattaaacactttaaaatcgggctaaccgcaaatatcgggtgatggaattcaccctgtaattctttaaccgtcaattgacctttatgcagatttaatattcctaaaacgtataactcttctaatgttaattgacacatatttaaataacactttagatttcgaaataattcttgtgacgacaataaatacgatacatagtcacaactaaaatcaaatgtatattgaccaaaataacgttcaatatagtcactaagctcattattcatatattctattttatctatatgcattttattaatcgaaatagtcaatttacgttgatccctttgatctcttcctttcaatagccattgatgattgtttaaataacttaacatttgaagaagggccatcttagattggatttctttcatttttaataaactatctattgaagcgctattggaatcagaattatcatatttaactaatagatttaatagtttcacttgagtcaaagtgagatgaaatgaatatttcaacatatcattaatgactttcaacattagtatgtgtgcagttaaacgcttaactttaaatttagacatctttaaaaacctctcttaaaccatgcctatatctcaagatgatatttcaaatgaacaatactattgcttgagaccattaatgaatgatcataaatatttctttctataaaattagctttccaataactgtgttgttgcataatatcattcacaagtacaccattttcggaagtatgattatctttatctatacttaaaacaatttgtttagttttagcatggctaaattgttgaagacccttacacgataaacgtatagcgtctgaattctcatttaacaatgcggctggcaaacaaatgacacattgtacttcatgtttgaacttcgttacaatcatcgtgtcattttgataaataacaatccctcgtaattgattaagtatatttatgataaaaatgaatattgataatctagttaaatttatttctttgctcgcttcacttataattgacatgtgcataataagtcctcgaaattttgtataatttgtcaaaagttcagtaaccttattaaaatcagacattgtgattttttcttttaagtcattattctcattaatcaaatctacatcacatataattttagaacatgcaatagacacctgttctatttgtcttagcggtaagataaaatagtctattagatgatcaatttctttatcatagcgcgtattcaactcttttggttccagatgatatattaattcaaatactcctatataattatctattaaacgtttcagtttttgaattgcagtagtatttaagtcgttaattaaaaatgcaatcttacatctattactctcaaaagtcatattaaaaattgtagctactagcttttctatcttgcctctttcagtactcgttaacaattccttatattcatgtttaatacgaaatactacatttacattgtaattcactatcttttgaagtaataaagtgatttgttcaatcgatagctcattgcttgtgtcgattgtaacaattatatgcaagttttcaggattaacacctaatctttgaatgatttgtttaatagtataataatccatccaataaaaattacttcctttaatataaatgtttttaggttgatacatttgactcctttttgtaggctcaaaaggtatatcaatctcgcgcatacttgaagaactttgattagtatcatcaaataattcaattatatttttatcaatttcaactaattgggaatggttaattgaatgagatgttggactatatctttttctaattaatttaggagtgttaccatacgtttctttaaagaggtgtataaaacgagaataatgattaaaaccatgactacttgcgatttcttcaataggcttcttagaagttaaaatatcaattaagcaatgctccagtctaatatgatttaaatattgaataaaattactataaggtgtcgctttaaccatgtcacttaaagctttgtttgtaatactaacttgattaatgacatctttcctatttatctttttatggtggttgtttgttaaataatcgtgcacttcttcggctactaaatgacgactaccatcgtatgtatttaatgacattaattcaacacacatgtaattaataatcttatcattagcattataagactgttgtttaattttgctgtagattaaatacttaatcaagattctaaaagtgctagcaacctcatttgttaatatcttgccacgcatcatatagtttgcattcataaacttcaaaaatgtctttgcacttacttcaacaacacaacatacactatcatcatgaccatcaatttgatacaaatcattcaacataataacggtgacatcatttctttttacatcatattgttgtagattgattgaaactacacctgtaccttgtagccaatatataatttttaagttcgcttccttcacactactcattttcatacttttataaatatgtagtgaataattatctgtcatcttacatcctcacatatacaaatatattgatttactcctgtttgtctttctcaaatcaattgtcaacatctaatattcactaccaattatatcgccacatgttttttagcagtaacaaaacataaatcgattatatcaaataatacttttattaaaacatttttttatgctaaattaggatattttatccattaaatatacattttcatccaaataccaaagctttcataatcatagaaacttgatcgttcgtgtcgaatttttatgcattttctgattaaaagtcctatattatgcacaaaatatacatttagaattttcagtaatattacaaatttgtaacagacttattttcgaaacattcagttttcacaaagaatgccgtagttataagttttgcaaaatgcaaatttctatacttttaaaattctattgtgtcaagatattagcaaaaaattacaaaacgttaacaaagcacacaaggacgctaatttctgttatagtctttcttgtcgtttaattacgagagataacttataacattaattttgtcacacggacattacgaaaatattttagatttaaaatttttaggaggatatttttaaaatgaagaaaatcgctacagctactatcgcaactgcaggattcgctacaatcgcaattgcatcaggaaatcaagctcatgcttctgagcaagataactacggttataatccaaacgacccaacatcatatagctatacttacactattgatgcacaaggtaactaccattacacatggaaaggtaactggcatccaagtcaattaaaccaagataatggctactacagctattactactacaatggctacaataactataactacaacaattacaacaatggttatagctacaataattacagccgttacaacaactactcaaataataatcaatcatataactacaataactataatagttacaacacaaacagctaccgtactggtggtttaggtgcaagctacagcacttcaagcaacaatgttcaagtaactacaactatggctccatcatcaaatggccgttcaatctcaagtggttatacttcaggacgtaacttatacacttctggtcaatgtacatactacgtatttgatcgtgtaggtggtaaaatcggttcaacttggggcaatgcaagtaactgggctaacgcagctgcaagagctggttacacagtgaacaatacaccaaaagctggtgcaattatgcaaacaactcaaggtgcatacggtcacgttgcatacgttgaaagtgttaacagcaatggttcagtaagagtttcagaaatgaactatggttatggcccaggtgttgtaacttcacgtacaatctcagctagccaagctgctggttataacttcattcactaattagtgatggctatgtttacgccaacaaggtttcaagagccttgttggcttttttaatttctatgaaaaaaatcgaattggtaaaaatctcaaaatttcgattttcaccaatccgattcactctgtaataaagaataaacaacatacagccattgacacacccaaatttaggcatgtcaaatcggctatacattgataaatttttagttaaagtacttacaaatatacttgccttcaaattctcaattaatttagtcattacaaatcatgacataaaacttacattacatatatcaacatgttccgctacaaaacatattcagtatatgtatagaggatatttattctaagttaaaaccttttcaaactataaccgctacaattataaatgattaaagtgtttcaacatattatatatattccacgctcacattaagttaaacgtgaattcgatgactttttaatacctatccctgtaaaaccatagataattgctataattgcgcataaataacatggtactgtccatatgaaaaattcttcaacagagacatgaagttgattcgtatagtaaatacctgatgttccccatggtattaaaggtaagaccatcgtacttgagtcttcaagtgttcttgataaaacggaacgagagacttggtatttttcgaacaaatctttcattaacacaccgaccataataattacaatcgaagcaacacctgcagcgaatacaagcgcaatacaacaaataacagtaatacatattaaacttcctacagaatggatgcctttagaaatagtagttaataagacttctaaacatcctgctttttctacaatacctgcaaatgcatatccgcaaaatatcgttactaatatttgggtcatactcatcataccaccctgttctaacaagcttttcacactggatgaaatatgagactgatgtatcattgagtcgttaaaaccactaaatgttgctttgaaaccatctgtcattttgaaatgatgattaaaagtccccactataatggcagaaaagcttgatattagcatagctggcactgtagccattttaaatagcaaacaaacaatgatcacaattaagggaacccagacccatatgttaatttgataaatctgtgcaagctctgataacaaagtttgaatctgtttatcatttgaatgccctttaaattgaaatccagcaataaaccatactaataaacctatgattgatgcaggtatcgtcgtccacatcatcgaatgtatatgtttaaatatattaactttagtaacaagcgccgctaaattagttgtatctgataatggtgacattttatcgccaaacacagcccctgctataatagcacccgctgccatccctggaggaatccccaattgattaccaatagaaataagtgcaatccctgcagttgatgcagagccccatgctgtaccagttgctacagatgtaacagcacttataaaaaaggctgatattaaaaaatagcttggattcaataaatctaagccataataaatcaaggctggcactgtgccagaaaacatccaactgcctactataattcctaccgctagtataattaaaattgcaggcattgcagtatttaaacgttctgcaatgcctttttctaaatcttgccatgttaagcctacacgttttgcaatccatgtggcatatgctgaggcaataattaataatacttgaattggaatatcaaaaaacacaaagcctgttacaacaacaataaccattacaatcattgtcgaaattgattctaaaaaggttggttttcttgtcatcatctatcgtccccttcgcttattgatgagaaacctcttttcttcaatttattgcttttgcataatgctatatccttttctatcttcaagccatcatttattttaaatatttttctaaatcaagcttatctaaaccaatttcttcaactgttaagccttcctcaaagaagtctctctctaaaatggttgatgcaattacaattactgcatctatatttggtgtcggtacatcaataacacgacctaagcttgaccatagtactaaaccatatgcaatatcttcagttaaatatctgctttctacatgatttggtcctggaatttgtgaaaatactgggcttgtattaaacaaacgatttaatggttcatcttctttatcacgttctaaataaccacgttcaatacgtgattctttagctgttgataattcaaaacctaatctacggcctaaattcaaacgttctaattcgattgcatgaagtaatctaactgtatgtttagtaattccttctttatataaagcgaactcgccagcataatcaatgcgaccgacattcaataatgttggtcctggatgcacttcaggattaccattttcaagatttgttttaattaagctttcctcttttactaaatgatcataaatacttgaaactttgtcataacaatcatttagacagcttctatcatatgttgaaaagaagatacgacgtacatttagagataaatcaactgctgcattttcaaaatcgacacgcgtaccatacgtcaacgtattagcttccgctagttgtggttttgtttcaatatgtctatcttctaaaacattcataaaacgaattgaccccattgctgcagccatgttgaagaatatcaactgattatcagttacatgctctgccattacatcagcataatactctatgtatgaagatggaataatcacttgaacaatttcagcatcttttaaaacatattccatatcatcactaatatcagtgaattttacgaaacgttcatcaccttcattattaaaatcaaatccgcccttttcgattgcgttttgaaacttacttatagattgattacgacaatataatttaacatcgtggcctttgctcaccatatctactgctgccgtaactgcgccatttcctgatcctacaattgctattttcataaacaaccctctttctatctttggttaaaattaaaaacaaattatacgtaagacaatataaaaatgatgcgaattcattacgcatcattataaatgttaagtatatataaccttaaattaacctatttaaacgccgacgtccaccaattatttttatttttaataattgtttaataaacatgtttatttttgattatattttgttatagttaaagataatattacaattttcaaaggagtgtctaatatgacaactgaaatgaacgacgtaacaaatcatcaaccgaatcgcaaatccaatgatgagaacattatggcgatgcttatctatttattaagtttattcacatctattattggtccactgattatatggttattgaaaaaagatgaatcgaaactagttgatcgtgctggaaaaaattatcttaactatacgatttcttatattatttggtctatcgttttagtcgttatcactttaataggcgttttcctaattgctaccgatattagtttcattatcattataggtttcatcattacatttatcggtattttatccatattcgctttctcaatattatcttttgtattcacaattattgcgtgtgtcaaatattataatggtcaagaatatgtaatacctttaacaattcgatttatttaaacatattacaaataaatatttcctattaattatctgttaatctcattgtaactttgactaatttttattacaaaattagtcaaagtttttttattcttttacaaatcaataacattccccacaagaagcattaattttgttaaagtaactattgtcatcaattcgagatgtgagaataaaacagtcgctacgttttatttataaaaaaagatatagaactttggaggactttattcatgaaaaaattagtaacagcaactacgttaacagcaggaatcggcacagcattagtaggtcaagcacatcatgcagatgctgctgaaaattatacaaattacaacaactataactacaacacgactcaaactacaacgactacaacaactacgacaactacatcatcaatttcacattctggtaacttatacactgcaggacaatgtacttggtatgtatatgataaagtaggcggagaaatcggttctacttggggaaatgctaataattgggctgctgctgcacaaggtgctggattcacagtaaatcatacaccttctaaaggcgctatcctacaatcttctgaaggaccatttggtcacgttgcatatgtagaaagtgtaaacagtgatggttcagttacaatttcagaaatgaattatagtggcggacctttctcagtaagttctagaactatttctgcaagtgaagcaggtaactacaactacatccatatttaatataaacacgatgatacatattgtcttgaaacttaattctagtacatatgtcatcaaaaaactttgagctttcctttataggagaagctctttttttgctatttttcgttgccacctacttatttatatttcctcccatattcaaaatattaattttttctaatactattaactttaaaactacgttatctaatttaattgatccagtttttccacattacaatattcatagttctacagtgcctaagttatatcacctccatcaaaagtacgcgcttacatcattgatacacaagacatcatgacatagttgtatactgtctaatcttctactatactaagataaaaggagtgatcttttatggaaaaagtttatgttgctggtgcaataccagaagtaggtttaaaacttttacaagaacattttgaagttgaaatgtatgaaggtaaaggattagtcgataaagacactttaattaaaggtgttaaaaacgcgactgccttaattagtttattatctacaaacgttgataaagatgttatcgatgctggtaaagacttaaaaatcattgccaactatggcgctggttttaataatattgatatcgagtatgcccgagaaaaaagtatagatgttacaaacacacctaaagcatcaacaaacgcgactgccgatttaacaattggattagtacttgcagtagcgcgtcgtattgttgaaggggaccaattatcacgtacaactggatttgatggatgggcacctttatttttcagaggtagagaagtatctgggaaaacaatcggcattatcggtttaggtgaaattggtagtgcagtagcgcgtcgtgcaagagcatttgacatggatgtactatacacaggacctaatcgcaaagaagaaaaagaacgagaaatcggtgcaaaatatgtagatttagatacactattaaagaatgcagattttatcactatcaacgctgcttataatcctaaaatgcatcatttaattgatacagaacaatttaaaatgatgaaatctacggcgtatttaatcaatgcctctcgtggtccaatcgtgcacgaacaagcactagtgcaagcattgaaagataatgaaattgaaggtgctgcacttgatgtatatgaatttgaaccagatattaccgatgacttaaaatcacttaataatgtagtattaacaccgcatattggtaatgctacatttgaagcacgtgacatgatgtctaaaattgttgctaatgctgcaattagtgccgttcaaggtgagaaaccacaatttgtcgttaactaataattgaatttattataaaaacaagaacccccatatgttgagctctcgtttcaacatacgggggttttcatattgttgtattatttctctttcgatttatataagaatttagtttgtccagctgctaatgcatttggcatcattttcataatacgatttctaactgcaacaactaaacgactacgatattgggcaattttaccgatttttctagaacgcttaattacttttgcagtatgtttgacacgtattttatcataacgctgtaatgctttttcaaagtcgtatgtgttaaaacaatttactaatacgatagcatcttccattgcttgtccagcaccttgccccatattaggcgttgtcgcatgtgctgcatctcctagtaaaatagtacgaccataaacaaaagatttgagtggtttcaaatcataaatattatgcaataagatacctgtttcactttgtttgtctaagatctctctaacttcatttggatagtgattaaagtatgcttgcaaatgaggtttaccaaacgaactatatttatgattgttttccttcgagttaattgtaatgaaccaatatgcttgattatttaataacggaacaatacctactcttccttttcttccccagtattcttttgcacaatccggatgctttaaatcaatatcatcaattaaacctctaaagcatgtatacccttgatataatactttactgtcagcatttacagattgtctcactttagaatgaattccatcagcaccaatacataaatcaaatgcttcactttcttgttccgcgaaatgtatggtaactttatctgtctcattatctatatgcgtgacttcatgatttgtaaatattgcgtcatcttttacataagatttaataatgtcaattaatgtttgacgtggtaacgtcacattcaatgtattactttttaatttaacagtagttaacaggcgatctttgtcatctaacactgtcattgtagataagatttgcccagcatttttaatacctttagctaagtcatgattacctagttttttaagcacattatctccgataccaatcccagcgccaatttctttaactgactcatttttttcaaagactttaatagtatgaccttgttcttgtaataatgcagcagctgttaatccaccgatgcctgcacctataattgctatcttcatattgtcacctctatatttttcattcttttctattttatcacatgcactattgtttaaaaatgactcttggaactaacgtttcatttttaaggacttaagtgtattatctgcaccattgtatattacatgcacatttagacagcaatattcatttacatcatgtacatttgtaacaatgatgtgggagcttgggacataaatcaatgtcctagggtctataatattatattggcagtatttgactgaatgaaaatgcgcttacaacaagcttttttcaactctagtcaggggccccaacacagagaatttcgaaaagaaattctacaggcaatgcgagttggggtgggggtcccaacacagaagctgacgaaaagtcagcttacaataatgtgcaagttggcggggccccaacatagagaaattggattcccaatttctacagacaatgcaagttggggtgggacaacgataaagaaatactttttctatagaaattagtatttcttatgcatgagttttactcatgtattcctatttttaagtacacattagctgtggctaatgtgtaagaaccactacataataaatcattagtggctctttatcatttctgtcccactcccgcgttttttgttaggttaaaatccatttaactaacacactcagaatgtgctaaaggagctcgaaacaataaattgttccagctcctttaagcaccgatgtcttatttataatatgtttgtctaatatcatctttctttataccaaactgcttataggatttatccattaatttggcaattttatctgcccagcgaatgtcactcgcatattgatgttgcgcaggattttctggattccatcgcatttgatataaattcagttgattgttttcaaaatattcattacgaatgaactttgcaccaccaataatcgccttatctggtgatgtccattgttccttttcagcataacttttcccactacgaacagcactactatcgaatgctcctataccaaaaaagttgtaatagcgtttttttccatctttaatgccttttgctaattctgatttgccgttacctgtttctactaatgcatggctaacaagataaatgacattaacctcatatttttcttgagcttctagaaaaactttccctcgattttctaaaatccccttaccttttagcaattggttaacttcagattccgacattggcactttttctgtgatatccatatacttcatatcattgtctttatgtgaaatagtcattgctttagcaatttcattattatttgcttcaacaaatttaccatcctcttcttttgtctgtacaatacctttcccttgttgcattgaaacagcctcatcaaaagagtaattcacatcatttttaaacaatttagtttcattcacgatgagtaatacagcaaaaacaactaaaataactatcaatagtagcgttgaaatgcgtaacttgaaattcttcttcatatagacaaaacctcatttttcttacttagacaataaaaaatatgccactacaatcgctaatattacgattaaaaaagaagcgttaacgattactttcatcgttgttctatctctgaacatcatattaaagacaactagactaattgataatgaaacagcaaaaaaagtaatagctaacactaatttcatcataaatagacagactaaacctatgactaataatgtattagaaattacagctgacgtttttaacattctcgaattaatatgcactcaccctttttatttaaataacttacataatcataataatacatgatgtttcataggcctgtcgatgattgattcacaatagcacgtgatttttttgtttttcaatattattcatttattccatcaaaaacaccctttttaatttttacaaaaattaaaaaaagtgctcctacactgcttgcatgtagaaacactttttcattgtaatgttattcttctcgagacataccttttagcatattaagcatgtatgttaaactacggttcatgtcgtcatctttcaatacgcccaatagacttcttatagttgtcttagcatttggactcgcttgattggcaacgtgtaatcctttattaactttatttaggaagtcgcttaaatctgatacattgagttcacctaataaaaataccattgaagccatattagataatagccctgtataaatatctttattaagttcaactgcaaatttatttatgatgacttgacgtcctcgaattgcaccatttaaagcatctaatagttttgcatcatctaatgttttaataagcttgattgcttttaatatactatctttattcgctgcaattgcctctgtaacttcatttaaactttctaacttaatttgttcttctgatttttctaagcgtctaattttagaagatattctctcagccattatttatccacctgatttcccgggaaaacataatctgaacgttcccattttttctgtacttgaacactgtactgcggatgacgttttttattgacacggaaattattagggttcaacggtgacttaccacgtttcgtaattacctccaaacgacagctagtacgtttataagatggtgtatccgtgtattgatcaacatcactattagttaataagttaattgcacctagatctccattttccatcgcatcattatttaatggaatatagatttctttacctttaacacgatctgtcacgtgaacttgtaataccgcttctcctgtttcagaaatcagcttaacttctgcaccttcatgaatgcctctatcttcagcaagctctggagaaatttcaacaaatgcacgtggcactttgtatttaatcattggtgtttgataagtcatattaccttcatggaagtgctctaacaatcgaccattgtttacatgaatatcataaatttcatcttgcttaaagtaattatcaaatgataatgggaataattttgctttaccattatcaaaattgaatccttctaagtatagaataggctcatcagtaccatcaggttgtactggccattgtaaactattgaatccttctaaacgatcataacttaccccagcatatagaggtgttaagcgtgctacttcatccataatttcactaggatgcttgtaattccaatcaaatcctaatctattagcaattgcttggaaaattttccagtcaggttttgaatcaccaagaggttctaatgcttggtataaacgttgaatacgacgttcggtatttgtaaaagtaccgtctttttcaagtgaaggacttgctggcaatacaacatctgcgtatgttgctgtgaatgttaaaaattcatcttggactaccatgaaatctaatttttcaaacgcagcttgtacaaaattaatatttgaatctacaatacccgtatcttcaccatataagtacaatgagtgtacttctccgtcatgtataccttctaccatttcatgattatctttaccagcttttggattcaatttaacgccatattctttttcaaatttagcgcgaatatcatccgcttcaatactttgataaccagtaatcttatcaggcatacttcccatatcactacatccttgaacattattatgtccacgtaatggatacgcaccagtaccaggacgacgataattacctgttactaataataagtttgaaatcgctgtacttgagtcactaccaatgtcttgttgtgtaatacccattgcccaacaaattacaacagattcagctttagcacattcttcagcaaatttaatcaattctgattcaggaatacctgttgcttcttcagcaaaagccattgtaaatgtttctaatgatttgtaatattcatcaaaatcatctacccactcatcaataaatgctttatcgtgtaaatcatgatcaataatatacttagtcactgcgcttaaccacgctaaatccgtacctggtttcggttgataaaaacgatccgcacgttcagccatttcatgttttctaatatcaaacacatgtattttttgtccaaataatttttgagcacgtttcatgcgtgatgcaataactgggtgtgcttcggctgtattggtacctatcaatacagacattgccgctttttctagatcttcaatactacctgagtcaccgccgtgtccaaccgttctaaataagccttttgttgcaggtgcttggcaatatcttgaacagttatcaacgttatttgttccaataacttgtcttgctaatttttgcattaaatacgattcttcattcgtcgctttagaagaagaaatgaatgatagtgcatctgggccatacttttctttaatagatgtaaaattatctgcaatgacatttaaagcttcatcccattctacttcatggaactcaccatttttccttactagtggtttagttaatcgttgatctgaattaatatgtccccatgaaaacttacctttaacacaagtcgcaattttatttgctggagaatcatgtgatggttgtacttttaaaatttctctatctttagtccaaacttcaaatgaacaacccacaccacaataagtacacactgttttagttttcttaatacgctctttacgcatttctgcttctgaatctgagattgcaaatagtggaccataaccaggttctgcttttttagttaaatcaatcattgctgctaatgaaccaggttccgtatcagtcatataacccgcattaccttccatattcacttccatcatggcattacatggacataccgtcgcacattgaccacaagatacacatgaagactcattaatcggtacatcattatcccaaataacacgtggatgttcacgatcccaatcaattctaatagtttcattcacttcgatatcttgacatgcttctacacaacgcccacataagatacattgatttggatcataacgataaaatgggccgtaatctttttcgtatggcttctctttatattcatacgtttgatgctgaagcccccatgcatccatcgtattatgaatttcacaatcaccattattataatcacatactgtacaatacagcatatgcttttctaaaattcgatcaagcgcttctttttgagcatctttcacatcattgttcacagtatttacagtcattggacgatcaatcaccgtactacatgaacgttcaattttaccgtcaatttcaacagtacatgtatcacatgtttgaattggtcccatcgactcgttataacaaattgaaggtacaaaagtatcttgtgatttaataaattcaagtaaattcgtacctggttctacaagataatcttttccatcaagtgtaaccaccaaatgttcttgcatattactcaccccgtctatatatattttccgtaaatgacttttaataaattgctcatatccacctaaaataacgatgccccacacatctttcagatagaattaatttaattgtattactttatgtactagttgttaagtgaaattttgtattttgcctttttacaatcatttttatttgaaatattttgcgcgaaattaaatcatctttttgtttaattgaaaataattatcattattagttttccaattatctgtttcacgctttttgccatatctttcacaaccttattaatgacaatatttaataatcacctcacctaaaaatcgttatactatttataaataccctttttctgaaaattaataacccaagtttgataaatatctactatcatttagaaggtaagatttatctttaaattaaatttgtaatggattaatttataaaaatcaaatcaggcattaaataaaatagcccataaatacaaagtgttatcaccttctatttacgggctattagttctattcgttattctatttacagatcattctatctaattaatttgtgtacaattttgataacttattttcccttagtttactactctagattatcttttaataacttagtactttcagcttttgactgctcactaggaatgaagtagtacaatccgtcactttgaatgccgccttgaccactcaattgatgtttattaatcgtgtcattagcatctttataattgcttctaatcgtattcaaatcacctaatgttaaatctgttttaacattattttgaatttcattcattagactattaaaatgtgtaatcgatgatggacttgcaatcttattagccatcgcttcaagtacaatttgctgacgttgttgtcgaccaaagtcaccaccagcaccttcttctttacgacttctaataaacttcaatgcttgatcaccatttacatgtgtctgctgtccttttgtaaaacgaacaccatcaacagtgaatgtatcattacttactacatcaacaccgccgatgctatctatcatattatgcaaaccatccatatcgattgtcgcataatgatcaattggcacattcattaatttttcaagtgatttaacagccatatttggtccaccatatgcataggcatgtgcaattttttcagtagtaccacggccaacaatttccgctcttgtatcacgcggtatacttactatttcagttttcttcgttttagggttgatagataaaatcataatactatcactacgctctccgccaccctttttcttacgatcagcatctgaatcgacaccaaataaagcgattgtgaatggatcaccatcgtttaaactcacttttttatctcttaattctgaatgattgcgatctaacggattgtgtatcttattaccagtaataaaaattttagcagctacatacacaacagctacaatcgctaagattactaaaataccgaatacccataaaaatatttttttcggtaggctcattttacttttagacgaacgtttcaatcccaccactcctttactattccttacatactttgtctgttttctctatttattatatagtaaaataatttttttactatacttctgtagacgtataactattttttatcattttttatctctagagaatatctatctgtatttttgataaccaccatttgcatttaaaattttaagtaccgtttcatgacatgctttattacttataataaaaggtgcaccctttaaatgatcaattgccttaccatctaaagtcgtcatttttagattcaatagttctgcaaataaaaactgtgcagcaatgtcccaaggtttaggatttgtattaatatgtgccccaaattgaccttttgccactcgcatagaatctaatccgcaagcaccaactaaacgataactaaatgaggcgtcaaataaatcttgcaccgtatctagattcatcacttgtgcattaaacgatataatagcgtcttccaattttaacgatggtggttcttccatcttaattccattacaaaaagcaccttctcctcgtattgctttataaagctttttatgcggataatcatatacgtacgataacattggtttaccttcataaaaatacgccaatataatacaataatcttcttgctgttttactaaattggcagttccatcaatgggatccataatccataaatgattaatttcattcgtaatcattgcattacttttttcttccgctaatagttggtgttccggaaaatatgttgctaaaaattgttgaaattgttgttgaatctgtttatctacatttgtaactaaatcaaatcgatgacgcttagtttctgtagtcatttccataattaattgcggaataacattgtctatttgtttcaaccacgaacatattaacttatctatttgctgtaatgttttatctgtcatttcgtccaccacttctcatatcattatcattttattattaccctatattaaaagaatcaacaatacaactgaagacttcttcattttatgcataaaaaaatcggctagtcacgtgctagccgacaaatagaaaggaaagtaagtaataaatattgaagatgttgtgatgtaacttgaacgattaaaagctatctgttatatagctctacccctttgtttaatcgctccccctgttacaagtaatatcatagcacaatcttttttaaaatgtaagcgttttccacaaaatttttacgattttttttaaaagatattgaaaatgtcctcattgtcactcttatgttatactttgtgtaatatatcatcttttaggaggtggctgtcatgaataaagctgaaaggcaaaatttaataattactgcaattcaacaaaataaaaaaatgaccgctttagaattagctaaatattgcaacgtatccaaacgcacaattttaagagatattgatgatttagaaaatcaaggtgttaaaatttatgcgcattatgggaaaaatggtggttaccaaatacaacaagcacaatctaaaattgcattaaacttatctgaaacacaattatcggccttatttttagtgcttaatgaaagtcagtcgtactcgacattaccatataaaagcgaaatcaacgcaattataaaacaatgtttaagtcttccacaaacacgcttaagaaaattgcttaaacgcatggacttttatattaaatttgatgacacacaacatatgacactcccaatgctgttttccgacattttaatttattgtacagaacgaaatgtgatgttagtagatcatagggttgatgataatattaaagctgaaaacgttatatttattggccttttgtgtaaacatggacattggcatgcagtcatttatgacattgctcaagacaaaactgccgaacttgaaattgaaaatattatagatatttcgtattcattcggtaagacgattcaaaccagagacatatccattgataactatcatcaatttttaaaccccatcgattcctaaaaaacagcagtaagatgattttcaattagaaaatatcttgctgctgttctctatttatacaatacttcgtattgaatggcttcgctttcctagggtgccgtctcagccttggtcttcgactggcactgctccctcaggagtctcgccattaatactacgtattaacatgtaattttactttgaaatacttaaaaaaataaaacactttgcccaacttacactaccaatagaaactgctgttagaattcctcaaaatgatatttcgcgatatgttaatgaaattgttaaaaagatagctgatagcgaattcgatgaattcagacatcatcgtggcgcaacatcctatcatctaaaaatgatgttaaaaatcacctcatattcatatactcaatctgaattttctggccgtagaatagaaaaattacttcataacagtattcgaatgatgtggttagctcaagatcaaacaccttcttataaaactattaatctttttagagtgaatcctaatactgatgcgctaattgaatctttatttattcagtttcataataaaatgcatatcaaaaaagctgatttctatcaaataattaatagaaatcagcttttttcattgcctaaaaacttaatgtcccgacctctttatctacgcataaatacttattactgatataacgaaagaaacaaaattatttgctatatgtaatgcaattgttgaacctaggtttcttccagattttaaataagtgaaaactaatatgatggatagtatgagatatggaccaaactcaaacggcgactttgcatcagtcacatgaataaatgcaaataagaacaccgaaacaatactcatagctataaaattaaacttcttacctaattctccaattaaaatatgtctaaatacgatttcttcaactattggacctacaatcacaattaataagaatgctacaggtaaaaatgcaggcacttcaaacattttatttagctcaagttcattggctgtttcactatattgcaaatgtttaggtagaaactgtgtcatatattcatatgtataaattaagatgagagcaataatatacgttattgacaatctaagccaatattttttgatatacgcaaaaccagctcgaagccttgatggcatcacttttaaatgaaataaataaaatgcgccaatcccaatcgtatatgctaaagcttgtgtgatagtcgctacaaatatcagattactatcgatttcataataaccaaacaaaattggtcctatgtaagctgcaattgtgagtgcataaaatataacacctataattggaattataagcaaatctctccatgctatatctttaaacgtgtatttctttttttcattttccactgttatatcctttcctgtttaataattgatttttggaggtacttctacatgataaacgaaactaagtatatgagacaacaaattactaatttgattcaaatcattgatacgattaaatataataccttaatgacagattggaacattcaaacgcatatttataaatttaaccaaatagttactaatgaattgaataagttcaaaggctttgaaacattatatataataaacgaaaatcaagtttcctattatgaaattataacactacttaataaacgtcccctccgacaagtcgactatggtaacaaaattcaatatcttaatttttatcatacacaactatctaacgcattatttgcaattaaatttgcccattaacctatttttcataaaatgtcatttaaacaagttatttattaaaattcactttattacataaattatacaattaaaaagtttcttcaaattgtaaagatgcattaatcgagttataatcataatgattaagatggtagatttagtcttatataactacatttactaagatttaaatagatgagtacataatgtataaattgggaatatacagtatgacttacggtaatatatcaatatattgatatattatttgcacatgggagtatgctattttttatctatacatcttaaaaatatttacagttttataattcaatatcattaaacaaacaacatattcagcttatttttcattctcttacgttacaagttgtaaataccatcgcgttaaacaacaatagccaacgctaataaaatatattgcgttaaagtggagtgattaatatgtcaaacgtactaacagaaatagatagtcaatatccatatatgactaaaaatgaaaaaaagatagctaaatttatactaaattcacctcaaaaggtgattaaaatgaggtctcaagacttagcaagcttattagatattagtacatcatcagtcattcgattcagcaagaaaattactgatggcggttttcacgacttgaaaataaatatatctaaatatgttcctaaagcatcatcaatttacaatgttgaattaatgaataacgaaagcacagaatctttaagaactaaactccatacacgtactacacgcgcacttaatcatgctaataacgaattaaatgataaaactattgatcaaatatgtcattgtttaaaacgttctgagacgatttttatatatggttttggcgcatcttttgtagttgctaccgacttataccaaaagttatcaagaataggtcttaatattcaacttgttcaagaaacacatatttttgcaacattattagcaactcacaattcgaacgacagtgttattcttattactaacaatggtacgcaaagtgaaatgcaatcaatggttaaagttattgatgactaccatatacctataattacaattactagtacaagggataatcccgtagcacaggcatcaaatattgttttaacttatgggaaaactgatgaaaatgagatgcatatgggagcaacaacttcattatttgctcaaatgttcactattgatattttatattatcgttatgttgcattaaattatcacgcatcattagatttcataacacaatctaaaatggctttagataactatcgtaaacatttatcaaatattaactttaaacattaacagtcttatataaattctttaatcatgtcatataataatttatgcatcattttcaaagcttacatgtcttttatcttgtataacatacgcatatgaccaatgatttgataaggccattcaatttcttatattaaaaacaaacgcagttgattaacggattcattccatatatcaattgcgtttgttattttaataatgctattttttattttaaagcccacagtaaaaactaacgataatattgccacttataagtttttcacactacaacttcgatttaagctatatttataaaaaaatgcgcctactcataacattctttggctatttaactttaataagctagggccaaatttgtcataaaataagcgcacattataatcatactattttgcttttacattatttttattatatctaataaagtaataaatcgttacaatcgttaagaagatgacaccaattagcactgatattctagtttcaacattaaataccataccaaccaatactaatattaagaataagattgttaaatagttagttactgcgccaccaggcattttgaatgggtgaccttccaattcttcagggtgtaattttctaaaacgtaagtgactgaataaaatcataaaccaaggaatcatacctggtaaaatagacgcactataaacgtatacgaaaatactcttcgctccatcgatatataaaggtaaaattacgtttaataaagcaccaattaaaataccaagagatactgctataacagtgtacaatggtacaccatttctcattattttagtaaatattttcggcatttcacctttatgagcaagtgtataaatcatacgactcgcactgaaaatacctgagttacatcctgacattgctgcagttaatacaacaaagttaattaatccagctgcaaatgtaataccgattttagcaaatgttgcaacaaacggacttccaatgtctcctaattgattccaaggatacactgaaacaataacaaaaatagcacctaaatagaaaattaaaattctccagataacaccattcactgctttaacgatatttttctgaggatctttagtttcacctgccgtaatacctatcagttccacaccttggtatgaaccaattacaattgataatgcaaagaagaaaccaacaataccatttggcataaatccgccatttgtccatagattagaaatacctaccgcatggccaccatttccaaaaccaaagaaaataagaccaaaaccagcaataatcattaaaataattgttacaactttaattaaagcaaaccaaaattcaaattctccaaacgcttttaccgagaataaattcgctgccattaataataaaatagcaataacaccaggaatccaagttggcaattccgggaaccaaaacttcatatattctcctactgcgatgacctcactcataccaactacaatccattggaatatattactccatgctgtcatataacctgctgcaggatgtatataatcacttgcaaatgttgcaaatgatcctgttgtagggtttaaataaatcatttcccccattgctctcatgattaaaaataaaaagatacccgcaattaaatatgcaaggataactgatgggcctgtccatttaattgtacttgtcgcacccatgaaaagccccacgccaatcgtaccaccaagtgcaatcatttgaatttgacgggcactcaatcccctttgtagttcattgttctccataacttcttaccccatctctgattgatactaaataaatccataaaaaaacttattgccgtaattatactataaattatcgattttggtacattaatatttgcataccatgcaatcgtttacagaactactatagcaggcttttgcaactttgcaaacaattattttgtgatttttctaaaaaattaaaaaagttgtccgtgaaccgttgagtcacatacaacttcagctactcttggtaattatgatataattttaataatattaaaaaggagtatatcaatgttaaaacaaatactgctacgtgctacaaaaatatcggtactctttgctgtagcatttttcatcataaattatatcggtatggaaaaacctgacatcctatatttagttggaagaactattattgcaacacttgctttcatactcatttgtcttacagtatttactattattaattctccagagcgcaagattaaactcggtacgactttaccgattgcattaattattggtatcattttcggcgccatatttttaacggtacaaatcggtgtcatcactgggttaatcatcggtgtgattgctacgtttatttgggaattgattgaaaaaaataaaggaggtcgttcatcatgacaacagcattaattggtgtaattgtattaatcttactaattattagctttgtgccaaactaccgtgctatgaaatcagcaaaagaacaaggaagtaatgcaacaagagctacaattatagtaggcatagatattatcttaattgtacttatcatcgtgacgttattattaaaatatatgtaactatttaaaccaccctatctcatacataaacatgaacgttctaccatttcacatacatatggtcgtccatttaatgaggtaaggtggttttctcgttaaagtttaccttgtaatagtaaaaaatagccaattgttgcgagtattaagtaaatcattgaaccaacaacaaaagatcttacttgcacgcgaaatggtgtctgtttgttaaatataggaccaatcaccaaatttccaacgcctaaaattactggaccagctagaaaaaacaatataatgtaacccatcatgatacgcctcctatttcgtaaagaaacgcgctacaatttgatcgtaatcaatatcttttgctacataatctacattagaaaagtcctgtgcgcttgtcattttattcgtattaacaataacatctaatccagctgcaatcgcggctgttgcaccatttacagaatcttcaatagccaaacattgtgtcggcatataatttaattgttgtactgcagataaatataattcaggatcaggtttaacttgttcaacatcttctctaccaacaactacctctatataatcatctagacctaatgctttaaaggtaggcattatttccgctttcacactacttgtggcaatcgccataggaatgtgacgttgctttaaaaatgccatcaatgatttaatcgtatcaatcatcggtaatgttgtactagtaagatgatgttcttcataaagtttatctttattttccgaaccaatcgctttaattaaatggtcatgcaaatctgtagctgctcctccaatagaagaacgataaaaatcaatgcttataggatcggcattatgcatctctaaatgtttattaataacattaaataaatgttgttccgtatctattattgttccatcgaaatcaaatataactgctctatacatatatttactcctctattttttctctttatcaaagcttaacacagtccgatgaccacttcattctattagtgcaattataacttttttgaccaatactttgctaaaataggccctgttatattatgaatgaaactaaacactgcgcctggtactgctgcaattggattaaaatgcaatgctgctaatgacacagctaaaccagagttctgcattccaacttcaatactgactgctttttgatcttgtcgatctaattttaaaagacgagctaaccaatatccaatcgtatatcctaatacgttatgtaaaataactactaaaaatattaataatcctgtagttaagatttggtgcttactgccacctacaactattgctaaaattaatgaaatagcaacaactgatataattggcaaagctgtagaagctttttcagcaattttacgattaataatttgcaaaacaatacctaaagcaattggaattaatacaacttgaacaactgaccacaacatactcaagaaagatacttccaaccattcatttgcaaatagatatattaacgcaggtgtaacgaatggcgctagcaacgtagagaccgtcgtaatagaaacagaaagtgctacgttagctttggctaaataactcattacattacttgatgtcccacccggacaacatccaactaatattacgccaacagcaatatcaggtggtaaatgaaaagactttgcaattataaatgctaatgtgggcataatactgaattgtagacagacaccaataattactgctctaggtgctttaaagaccattttgaaatcattaggtgtaattgttaatcccatacctaacataacaataccaagtaaataaggtacccacttacctaatgtcgcaacatgttgtggggaaataaatccaataacagctgctactaacatccataccaaaaaactcttcgtggcaaatatactcaatttttgaaacattgttaacacatcctcgtcgataatattgaaaaatattaccataagaccagtaaggttacaattacttttctgaaaattaagattatttagtcattctcttcttattgcaaatattttatcactgataaaaaattattttaaacttcattcaaaagtcttagtgaataaagaaaaaaagcgtggtaaaatcaacttgaacaaaattaagtcacctttataaatattaaacgtgtatttaatgccatgtattcctcgggaggtcctcacatgttaattgataaattcgaaacatacatcatcaacatcgccggtttaaatgaccgtactactagaaaaaaattaagtaagttatgcaaaagtgtacaattttgtgatgcgttgcaattctcaataaacaaacagtttaatcagtatgtattagaaattagcttaccaaagcaacaacttccatacttcatttcatttttaagttttcatcagtatagtattttccaagtactttcaccaaagaaaataaatgaattacttgattctgataatttatatcaatctgcaaagcgtttcgatatcaatattgatggcttgcaagatgctttcattaaagacaaagtcatcgatattatgaatatgttccaaaatcacactgatatcacttatacgttgaataagtctcatgcacatattatatgtacgccagaaatatttgctaaattgttacatacgattgcaactagaaatatcgacattctatctgccaattatagatcgtcatctatgagcaaagctcgtatatcataacaaaagacacatctatacgatgatcatttacaatgattgcgtatagtgatgtgtctttttttgtattatttatcttcggacgattgatcctcaaccatttgttcaaatgcttcacgaacttgtggtactgtcatacctactacaacttggatactcttaccactctttactaatccgtgtgccatttgttgatgcgtgaaatattccgtatccgcaactttactttcatcataaacagttaagcgtaatcttgttgtacagttagtaacatctttgatattttctttgccgcctaaaccgtcgaggtaatacgcagctttgtcttcgtattcattacctgttgaagcacgtttagaatctacgctatcaccttttttatttttgtaatcttgcttagaaaataatttaacttcctcttctgttttcttacgtccaggtaatggaatatcaaatttcaaaattaagaatctgaataagaagaagtaaatcgctacaaatatcagaccgataataacttgtgcaacataagtaccccaatgttctttacctaatggcaaccagtttgttgaaataaagtctaacaagccaccacccatgttacctacaacaccaaatgcgtacattaaagtatccattgatgctgctaaaactgcgtgtaaaacaaataagtatggtgcgatgaataagaatgtaaattctaatggctcagtaatacctacaacgactgctgttaatgttgcaggaataagtaatgctgctacttttttacgattttctttaggtgtcgtagcatacattgctaaagcaatacctaaacatccaaatactttcccatttccttgaagcataaagccataagggaattgctcttttaatggcttagtactcttagcaaactcatttaaatgttgtaaccattcagctttcaagccgtgattgactactactggtccaacttcaattggtgcataaataaagtgatgtaatcctgttggtattaatacacgttctaagaagtggtacagccaaacaccgatatagcctgaagcgatgataaagtgttgcattgaaccaataccgtgctgaacagttggccaaataacacaagtaattgctgctaatggtaacatcacaaaaaatgaaatcgtaactacaaatgttaaaccttggaatacaccaaccatttctggtaatcgtttactatagtatctattgtgaatccaagtaataatagctgaaataataataccacctagaatattcgtatccaatgtggcaatacctgcaattgattttaaaccaggtacattttcaacgcctttttctaaattagcgccaaacgtatgtggccattgcgttaaaatggcatttataaatgtattaaacattaagtaacccatcaatgctgcaagtgctgcatgacctggtgcttttttagctaaagaaagtggtaaacctacaacaaatacaacttccatatgcgtaaaaataacccagccaccagattctattactgaccaaaatttaaaccaaaacgtatgttgatctgctaaactccccatgattgtaggatttttaaataatgtcgcaaagccaagcactatcccaaagaaagcgaacattaataccggtacaatcattgcactaccgaaacgctttatcgcattcatcttctattccctccatatcatctttcctaacaatacatctaattagattcatttataaatagatgtcttactatttaaatataatatatagtaaacgcttacacacctacaacgacattgacgtattttgaaagtattttgtataatcagattatcttttcatatagtgaaaattttttcacgaccttatatatgacatcgttgtatttgtaatacattcgttttaaacgcataatcaaacctatatcaatacacaaatatatataatgacatacaagattttaatgtaataacgatctatcacacatttattttcaaggaggttgaatatgtttttagatgaacacattaatcgaaactttgataaacttaatgataatgatttacatatcgctcactttatcaatacacatatagatgaatgtaaaaatatgaaaatacaagatttagcgcaattcacacatgcctcgaatgcaaccattcacagatttacacgcaaattaggttttgacggttatagtgattttaaatcgtaccttaaatttgaaagtaataagacacaccaattaccttctaactctatcgatagtttcaaacaagaaatcgatagtacattcagttatttagaacgcgttgattaccagcttcttactgaaaaaatgcatacagcttcaacaatatatttgtatggtacagggcgtgcacagttaaacgttgcttcagaggcacagcgtatattgttaacgttacataatcatgtcattgtacttcatgatgaacatgaacttaaaatgattttgaacaagagtgaacctaatgatttattctttattatttcattatcaggtgaaacacatgaattattagaagtaacaaacttgcttcaacttagacaaaaatactttatttctgttactacaatgaaagataatacccttgctcaaaaagcaaattacaacgtctatgtatccagtaacacattctacttaactgatggtacagactattctagcttcatcagttatcatatattctttgaaacacttgtaagaaaatataatgagtatttactacataatgatatttcaaattagaaaaaaggaagttatgatttaatggccttgagcctatcataacttccttttatcattttattgttgtgttgatgtttcgataacgtggtacatcttatcaaacatcaattcgaaaccatgcaccatggcatcatgatattcttttttcttttgcttgtattctaaattagtaaatcgtctttctttttcaactaatgaacgataataaaatagcatttgggtgccacctgtttcacgttcaaaaaattctacctcaatgacatcttgtgtttcacttagtccaggcataccgatagtcatcttaacgtattcatccataactaaagattcataaatgccttcaatcacatttactttgccattacgttgttgatctacaatacgatatttaccgccttctttaacgtccgcttcaatctctttattcgttctggccgatgtcataaaccattgtttcaacaaatctttctttgtccaagcttcgtatactaactctggagaaaatttataaagcttttcaacttcaacttcgacatgttcattctctacattaaattttgccactgttgtccacccactttcgctcttacttttattttaacgtatttttgctcagttccaaacatagatgatcatcatttttaaaagattagcgttatacggtgagtacaacatgatctgttaatataacaagccaccttacttggctacatcgatatattgttaagcattaatgtttcatttcttgactagtgttcttttttagctttggaaaattaaataaaatcgcaataagtccgcatacacctaataatataggataaatgctgtatgggaataacattaacggtgaaataccagctacaccagccgctgaaatgacttgcgggctatatggtaataaaccttggaagcagcctccaaatatatcaagaatacttgctgatttccttgaatctacatcatattcatctgcaatatttttagctaaaggacctgacataataatagagatggtgttgtttgccgtggcaatatctgcgacacttaccaaactcgcaattcctaattctgcgccacgctttgatttcactttagagcgaacaaattgcaacaaccattcaataccaccattgtgttgaataataccgactaaaccaccaattagcaacgcaatcatagcaatatcttccatgcttataatacctttggacactgcatctagtagccccatccaaccgaatgaaccatctatgagaccaatgattccggctaataatgttccgccaatcaatacgataatgacatttacacctaataatgctaataccaatactaaaatatacggtacaactttaattagattataatcatagcttttagcatgatttaaagaaatgccattcgttaagaaatacagaataataatcgttaaaatagcacctggcaatacaattttaaagtttactctgaatttatctttcattttcgtatgttgtgttctaaccgcagcaattgttgtatctgaaatcattgatagattatcgccgaacattgcacctccaacaactgtagccattgctagcgcagttggtacatctgtcgcttgtgcaaatccgtaaccaacaggtgctattgcagcaacagtccctacagacgtccccatagatatagaaacaaacatacaaatcacaaacaatcctacaataattaaattttctgggattaatgatagtcctaaattaactgtcgactttacgccacccattttttcagctgtatttgaaaatgcacctgctaaaataaaaatcaacatcattaaaataatgtttgaatggcctgcacctttcgtgaagacctcaacttttttagcaaatgattcttttcgattcattaataacgccacaattaccgttatcgtaattgcaacatttaatggcattgaagtaaaatcacctgtgataatacctacgcctaaaaacaacgccacaaataataacaaggggaataatgcccaagcattgctctttttatgtacttccatcctttttacctgctttccaattaaaaatacctctttctcacaaacgatgaagaaagaggttttcatgtgctttacctgcttatcttcaaaccattacggttactggaattggcacattcgagatgttgccgaggcttcatagggccagtccctccacctctctagataagtgatgcttatttacgtttacgttacaagataatccttagtacgtcaatcataaattaatcaggagtcgtataatatttttcataaacaatcattgctactgtaataataatcaaaacaataatgctaataacaagtaaaagccaccatttaagcattaatgcaataaaaatgaacacgatagacacacttactaatattaatgatatgactttaaattgctgaacacgttgcttggagatgactttcaactgtttgtttgatagacgcgtattttttatactgattcccagtatattttctaatatttgaaccaatacgatacttattgcaaatataataattggtaaaacatcatagctccctatagttaatgtataaattacaaatccaatgtaaagtaaccctgagacaaaggataaaaagtatgcgacgtatttgttaaacttaatgatatgctttttaacgttttgatgtgtaaaccatacattcgaaacgatcgcaactgctacaaataatgtgaatactatatataatggtaatttttgttcaggaaaaacagtcgctattccaaaagctaatgctaaaatcaaaaataatatagctctagatactattaatgccataataacaacccctttgtttaatatcgagtttgcaaatttacgtttatcagcgtttctatgatcagtacttctacgggtagcgtttctatgtaatttacatcatcttaacatataaatacttcgctatttaattgaaaacatatcctattattctttgtccgttctgacgtttaatatctagccttaggtatttcacttgttaatgaatttaactttcttccactaaccgtccctaaacccaatcccgcaacattttttaattttttcgttgttgtcctgacatcctcattaagaaagtttattctgcttaaaccttataatccacaccctgagcaaacgctccttatgacagagtattaaaataagccgataaagatacacacctttaccgactatttaaaatacacttcaccaattcattttaatttaatggattgaagtaactaaattaatattatgttgttcaattaaaagcttcatacaaacctaatctatttgcactccaccgctaacaccgaacacttgtccagttgtataacttgattcttctgacgctaatagcacataagttccacataactcaacaggttgacctgcacgacctaaaggtgttttttgaccaaatgttgggattttactttgaggttgtccaccagaaatttgtaatggtgaccagaatggaccaggcgctacacagttcactctaattccttttggtcctaattcttctgaaaaacttttagttaatgaaataattgctgcttttgaagcggcataatcatgaagaataggactaggatgataaccttgtacagatgatgtcgttgtaattgacgcacccggttttaaatattccaatgctttttgaactgtccaaaatagcggatagacattcgtttcaaatgtttctgtaaatgcctcagttgtaaatccatgaatatcatcatgatactgttgatgtccagcaactaaagtaacattatctaagccacctaattgttgatatgcttgttcaacaaggtcatagttgaactgctcatctcttatatcaccaggaattaacactgccttttgaccactttcttcaatcacttggcgtacttcttgtgcatcttgttcttcactcggaagatagttaatcgctacatctgcaccttctttagcatacgcaattgctgctgcacgccctattgctgagtcaccacctgtgactaatattttatagccttgtaagcgttgatgaccttggtaagacgtttcgccacaatcaggtgctggcgtcatttcagattgtaaacccggtacctcttgttcttgtttttcataatccgttgttttaaattttgttctaggatcttgagctgccattttttaacatctccttattcgcttaatggttattatttacccaatcttcctaggaacttaatcatgattacactaaaaattactttcttctttataaaaacaagctcgaattactcatgcaatagtctttttacaaattcaacaaaatactcaggtactttttcaagaatcctttcatccggtttatattgaggatgatgtaaatcatattcactatgagaaccaattaacgcaaatacacttggaaaatgttgactataacctgaaaaatcttctccaatcgtaagcggctgttccatcatttccaccttatatccaacatgttgggctactgcaattgctttatgcgtcaatgcctcatcattcatcacagcgccaggtaaatgtgtataatttaaattaattttcatattatatgcttgagccaatccgtccgcaatatcttgtaatcgtgtttctacaagctttcgtaccacaggatcaaaactacgcactgtgccttgtacatacgcatgatcagcaatgacattccaagtattaccacatgatatttgtccaattgttactaccgcttcatcaaacgcagatagatttctactaactatggattgaatactattaatcaattgcgccaacacaataactggatcgttgcattgttctggctttgcagcatgaccacccacgcctttaatatgaaactcaaaacgatctactgctgatgtaattgcccctgttttgattgcaaatgtacctaccgaacgcgatgggtcattatgaaaacccaatactgcttgtacatcttttaatgcatgtgtttcaataattttaaaagcgccatgtcctagttcttctgctggttgaaaaatgaatttaacacgcccagtaagagtgccctcaatttcttttaattttacagccgtagccaaaatactagccatgtgaatatcatgaccgcacgcatgcataacaccttcattttcagatttaaaatcctgttcaacaagctcttgaatcggtaaagcatcaatgtcagcccgaacagctatacaactcagaccttgtcccacttcagcaacaagcccagtcgcaagtggtaagtctaatattctaatatgatgttctgttaaaatatctttaattttttgtgtagtcttaaattctttatcggatagttctggaaattgatgaaaataccttctccaggtaacagcttgatcttttaatcccatcggtcattccccttccttaagtcaatgatatgttgtctaccctacgatgatcatctttgactattaaacgatgatttcacaacaatgtactcttgttaattactttcgctaatgatagacagttgtttaataatatcgtaacactgttgtcaaactattctaacttttataattaagaatctatacaaaaacgtgttctcggataaacttgtttttacaaaccacaaaagctctaaacattagtgtaaaccaatgcttagagctttctaattattttatgctttaaaagataatgtgttatctacgatgaccttaccgtctttaataactttttctgcgtgattgataccaaaatgatatggaatatattcatgatttggtgcatcccaaattactaaattagccttatcacctgtgttaattgtacccgcgttaatgtctattgctttagcagcattgaccgtaacagcattccaaacttcattaggtgatagctttaatttcaaggctgcaatcgccataacaagttgtaagttgtttgtgacactactaccagggttataatcagttgctaatgcaatcgcaccgttattgtctagcatgcctcttgcatctgcataatcttctttacctaaatagaacgtcgttgcaggtaagaggacagctacagtatcactatttcgcaacttttcttttcctttatcactagaagctactaagtggtctgctgatattgcttgttcatcaattgctaattccagtccgcctaacggatcaatttcatccgcatgtattttcactttaaaacctgcttctttggctttttgcatataatgttgcgattgttctattgtaaatacacctgtttcacagaaaatatccgcaaagtctgcatattgttttacttccggaagtaacgcaatcatttcttctaaaaatgcctcatttgaacttgcctctttaggtacagcatgaggccctaggaaagtatgtttcatgtctaaatcatatttctcagctaaacgattagacactttcaattgcttcagttcattttctctatctaatccataaccactcttactttcaactgcaagcacgccgtgtttaatcatagtaagcaaatcatgctctgcttttttaaacaagtcatcttcggatgtttctctagtagcattaacggtagataatatgccaccacccatttctaatatttcaaggtaagacttaccttgacgttttaatgacatctcatgttctcgagatccaccaaatgttaaatgggtatgtgcatctactaatgctggggacactaccttcccactagcatcaatcgtctcagtcgcatcgtagtcatctgtatgtgttccagcatatacaattttgccatctttaatgacaactgtaccatttttcacaacatttaattcatctaattccttacccttcaaaggtttatctgttgatctcggtaaaattaattctgctatatgattaattattaaatcattcattacttatcacctgctttatcaatcattggaatatgaatacctttttctttagctgtttgaatagcgatgtcatagccagcatcaacatgtcgggcaacacccatacctgggtcagtcgtcaatacacgttccaatcttctttcagcacgctctgatccatctgctacaacaaccatacccgcatgaagtgaatatcccatgccaacaccgccaccgtgatggaatgaaatccatgaaccacctgcagctgtgttaatgagtgcattcaatacagcccaatcaccaaccgcgtcactaccatctttcatactttctgtttcacggttaggactagcaactgaaccagcatctaaatggtctcgtccaataacaattggtgctgaaatttcaccgtcacgtacaagacgatttaaagctaagcccattttcgctctttctccatagcctaaccaagcaatacgtgatggtagtccttgatatgaaattttttcttcagctaaatcaagccatcttaataacttttcattttctgggaaaagtttgcgcatttcttcatccgcacgctcgatatcttttggatcaccactcaacgcagcaaagcggaatggccctttaccttcacagaataatggtctaatgtaagctggtacaaagcctgggaagtcaaaagcatttttcactccgttattgaaggctacttgacgaatattgttaccataatcaaatgctacagcgccacgtttttggaattcaagcattaattcaacatgctttgccattgaagcttgtgacagttcaacatattttttcggatctttttcacgcaatactttcgcttcttctacagagtatccttgtggcacatatccatttagcggatcatgtgcacttgtttggtcagtaataatgtcaattttaaatcctttttctagaatcgcttgatggatgtctacagcatttccaactaacccgattgataatccttctccacgttctttcgcctcttctgctaattttaatgcttcatctaaatcagctgttttaacatcacagtatttcgtatcaattcgcttatcaacacgtgtttcatcaacatccacgcaaattgctaccccatgattcatagtaattgctaacggttgcgcaccacccataccacctaaacctgctgtcagtgtaacagtgcctgctaaatctccattaaagtgttgattacctagctcggcaaatgtctcataagtaccttgcacaataccttgagaaccaatatatatccaactaccggctgtcatctgtccatacatgattaaaccttttttatctaattcattaaaatgatcccagtttgcccattcaggcactaatactgaatttgaaattaatacacgtggcgcttcttcatgtgttttaaatacagcaactggctttcctgattgtactaacattgtctcatctgattctaattctcgtaacgttttctctattgcttcaaaagcttcccaattacgtgctgcttttccaataccaccataaacaactaaatcttctggtctttcagcaacttctgggtctaaattgttgtataacattctaagtactgcttcttgttcccaacctttacactcaatactcaaacctttttttgcttgaatttttctcataaaattcgctcctgttctttttagaagttaattccactaaatttaaaacgcttacattattatcttcaatattcattatagtatgttaaaatatagccaacaaatataaataaactaattatccatagcttgaatctataaataaaaggagcaaaacacatgaaaattattcagttagaatacttcttggctatcgtgaaatataatagttttactaaagctgcacaatttttacatattagccagccatctttaactgctacgattaaaaaaatggaagcagatttaggttatgacttatttacacgttcaacaaaagacatcaagattaccgaaaaaggaatacagttttatcgttatgcgagcgaattagttcaacaatatcgatccacgatggaaaaaatgtatgatttaagcgttacatcagaaccaaggataaaaattgggactcttgaatctacgaatcaatggattgcgaatttaattcgaaagcaccattccgactaccctgaacagcaatatcgtttatatgaaatacatgataaacatcaatctatagagcaattactgaattttaatattcatttagctataacaaatgaaaaaataacccacgaagatataaaatctattccattatatgaggaatcttacattttattagcacccaaggaaacatttaaaaatcaaaattgggtagatgttgaaaatttgccactcatattaccaaacaaaaattctcaagtgcgcaaacacttagatgactattttaatagaagaaatattcgtccaaatgtcgttgtagaaacagatcgattcgaatcagcagttggatttgttcatctcggcttaggttacgctatcattccgagattttattaccaatcatttcacacgtctaatttagaatataaaaaaattcgtccaaacttaggccgaaaaatttatatcaattaccataaaaaacgcaaacactccgaacaagtacatacattcgtacaacaatgccaagattatttatatggacttttagaggctctttaacttaagttattagagcctcttatgcagttgcgtagtcaactgtatacctttcacctttaacttaagttattagagcctcttatgcagttgctcagtcaactgtataccttttgcctttaacttaagttattagagcctcttatgcagttgctcagtcaactgtataccttttgcctttaacttaagttattagaacctcttatgcagttgctcagtcaactgtataccttttgcctttaacttaagttattagagcctcttatgcagttgctcagtcaactgtaaaacaatttcacaaccaattttatgatttacatgtataaatcattacattcagaccaacaaacataaataagcagtaagatgactacaacttaagagtcttcttactgcaattatttttcaaatatatcaacgttaatataacttctattaagaaatactcacattctgccctgcaatgcaaatctcgtcacatataaatatttttaattattttaaaaaatgatgcactaaattagcaacgagcttagcagttctattgtcagcgtcatatgttggattcatctcagcaatactaactgaagacaccttatcacttggaataatacgttttgctaattcaagaacagtatgtggatacaaacctaacactgcaggcgcacttacccctggtgcaaatgcactatcaatgacatccatacaaatcgtaaacataatgacgtcatgttcatgcacaaaacgctcaatcatatctttaataggtggcgacacatggtttaataattcatctgcaaagacataatcaatctttttctctttagcataatcaaataaactttgcgtattaccaccttgagctataccaagaactaaataatcagtattgtcatcctcttctaaaatttgtctaaaactcgtaccagatgttgattcttgttcagcacgagtatcaaaatgcgcatcaatgttaatcacaccgattgactgtgttggataaactttacgcgtagctaaatattgtgcatacgcaatatcatgtccaccgcctaataaaaatgtttgtctatgattagcaattgacttcgctgcaagcatagcaaattctttttgagtatcaattaattcctcatgatcatgataaacatttccgtaatcgactaaagtttcacattgattcaaatccggcaaacctgcaaatgcttgtttaatcgcatctggcccttcttttgcaccaatgcgccccttgtttaaagcaacacctttgtcaacagcatagcctaatataccgacccctgatggcatactactcttttccagcttagacaaatcttcaaatgttactgtttgaaaatgtctaaattttttcgggtctgtttcactatctaaccttccagtccataaatttggttcaccttgcttgtacacagcatttccccctcttatttatgtggcttattaacaattaaagtataacgtataggaaattttgaattcaattcatagttaaatccgtaccttaaaaatacttatctacattacttttacccctattttctatgtaataacgaatacttagctgatttatgttaataaaatacgtcaagactattacattttcattaatattgacatagacaatttatctctcggcttgtaatatgtataattgttactaaaagatattttgcttgttacctaatggaggttacatataatgaagaacaataaaatttctggttttcaatgggcaatgacgattttcgtcttctttgtcattacaatggcgttatccattatgctcagagatttccagtctataattggtgtcaaacactttatatttgaagttacagatctagcaccattaattgctgcaatcatttgtatactcgttttcaaatataaaaaggtccaacttgcaggtttaaaattctcaatcagcctgaaagtaattgaacgtctattgctagctttaattttacctttaattattctaattattggtatgtacagctttaatacatttgcagatagctttattttattacaatcaacaggcttatcagtacctattacacacattctgattggacatattctgatggcgttcgtagtagaattcggattccgctcatacttacaaaatattgttgaaacgaaaatgaacacgttctttgcaagtattgttgttggtttgatgtattcagttttctcagcaaatacaacttatggtacagaatttgctgcttataacttcctttatacattctcattctctatgattcttggtgaattaattagagcgactaaaggacgtacaatttatattgcaacgacattccatgcttcaatgacattcggacttattttcttgtttagcgaagaaatcggcgatctattttcaatcaaagtcatcgccatttcaacagcaatcgttgcagtaggatacattggtttaagcttaattatccgaggtattgcatatttaacaacaagacgaaaccttgaagaacttgagcctaataattatttagaccatgtcaatgacgatgaagaaactaatcatactgaggctgaaaaatcttcttcaaatattaaagatgctgaaaaaacaggtgtagctactgcatcaacggtcggtgttgctaaaaatgatactgaaaatacagtggctgacgaaccaagcattcatgaaggtactgaaaaaacagaacctcaacatcacataggtaatcaaactgaatctaatcatgatgaagatcatgacatcacttcggagtcagtagaatcagcagaatcagttaaacaagcaccacaaagtgacgatttaacaaacgattcaaatgaagatgaaatagagcaatcattaaaagaacctgcgacttataaagaagacagacgttcatcagttgtaattgatgcagaaaaacatatcgaaaaaactgaagaacaatcttcagataaaaacaaataataacaaagcgcttgctagtacctcttaaaaagatgatgctagcaagcgcttttctatactatatattatttttctaaaattttaacaccctcttgagtgcctacaataacttgatctgccatatctaagaagtatcctgtctcaaacacacctgtcagatgaattaaatactcatggaacttatatgggtcaattccttttggtaacttacaatctaaaatataattgccattatcagttataaatgcgacatcttcgtttacacgacgttctacttttatatcagcgtatgattcaattttacgtaatatgtgataccagttaaatttatccacctctactggtaacttaaacgtctcacctaagtattgaactattttcgtttcatcgacaaccacaacaaaacgcgatgccatttcatctataactttctctctgaacagcgcaccaccgccacctttaattatatttaaagatggatctacttcatcagcaccatcaattgctaagtcgatatgatcaacatcattgatttcacatattttaatacctaattcttttgctaaaaatgcaattttattagaagtgcatacacctgtaatattgtaaccacgttctttaattagttgcgccatttgaggtaagagtaattccattgtacttcctgtaccaattcccagcgtcatgtcaccattgatttgacttaaaacatcatttaatgtcattaacttgagtgctttgacatctttcatgaaggtagcctcccatatttatgtaatctattcaattcatattttacatgactcgtataaattaacatacccttatttctaacatttttttaaacatatcaatcagaatttacaattctaaaaatgttttatagtacaatatattttaaataatactcgttaaggagaatgatatgatatcaattcacgcaatttcgacaggaaaaatccaagatttgccttatagctcgaaaagaccgatgcgctctgctttagataaaactaagatttcacaaacaacatggttatcttcaactggtttcactggtgatgaacaggcttataaagatcatggtggaccacataaagcagtttgtgggtttagtaagcataattatgcactgtatcaagatgatttacctacactacctattcatgcgatgtttggagagaatttaacatttgattatttagacgaatctgatgtttactttggtaatcaatatcgtttaggtgaagcgttaattgaggtttctgaaattagagaaccatgctggaaaattcaagcaaaatataatattcctgatttagtgaagcgcatgtctacatctggtaaaacaggtttctatttccgggtattaaaacaaggctatgtatctccaaatgatcagctttacttaatacaagaagcaccaatcgaacatcgtttatctgtacaacagcttaatgaactttattataatgatagacaaaatcaagatatgttacgatatgcactaaacaatccatttctgtcaccaacaagacgcgataaacttcaaaaaatgtataacagaacattgaaataattacctttcattataagtgttaaatgaacttttcaaaacaaaaaggaatcaacttacacatcgtttgtataatagtcttatctataaccactgatgctattgattccttttttatgttatatattttctttatttcaaactgtatattaatgatgtcacttcatttgatacgattcttgataacctattcaaaattccgccaaataacataaatattatataaatgccgatacttttaatcattttctactttttcttcgatacggaaacttgttttcgaattgaacacttcaccagcttttaaaattgacggtgctttttcaccatataaattaatatcatttggtaaaaattgtgtttctaatgtaaagccagaatgtggtttataaatattaaatggactatcccactcatcaggctggttaaaagtaaagaacacaacatgaggcatatctgtatcgacctctaacataaattcatgattttcaacatacattttatgttcaccaactgtaaatgggtgatcgagaccaccaaaacgtgtcatttgttggcttaattgcgcatgttgtgatgtaaaaatatcactcaattttatcttgttatcttcaaacacttcatgtaaatctagaatatcacctgtaacaatatttcgctcatctaatacatacatatctaattgattacttgaaatgcgatgattatcaacgacattattatctcgattcaaattgaagtacacatgattcgtaggactaaacaatgtgtcttctgatgcaactgcttcgtattcaatcgaccattggtgatccgcatcataaatatgtgtaatcgtcacatcgatatcacccgggaaatgatcatcagctgatttcaacaccgtcttaaatatcactttaatttgagcaatttcatttctaatttcataatcaaataacttattgtccaaaccatgacatccaccatgtaaatgatgttcgccgttgtttttttctaactgatattctttacctttcaacttaaatttagcattatcaattctaccgctatatcttcctatagaagcaccaaatttaaaaggattactatgataaaattcatccgcttcaacaacatttccaagaacaatattattatcatgatatttccaagacactactcttgctccataattcgtaaaaataattttagtttcatcattatcaattttgattaaatctacactttgtctttggtgctcaacttcaactatcatttttacttctcccttctaaccacaagtgttcaagctctgctgggtagcaacattactaaaacacctacaatacaaatgattgcaccgataacatcatatttatctggcatttgtttatctacgaccatcgcaaaaatcaaactcatgatgataaatacgccaccatatgctgcatatactcttccgaatgatggaaatgattgaaatgtcgcaatgacaccatataacatgagtatcgcaccgcctattagcccaacaagtgaagactgtccttccctaagccacagccaaatcaggtatcccccacctatttcacataagccagctaatataaatataaaaatcggatataacatgaaatcactccatcacacatttgctaccaataatctatcggctacatatcatttgtttacatttcttcttacttcacattcccattttaaaaagttcgttttcacattcatattgtacacttttttagacattattctatagctaaatataaaaaaataagagtaacacgctttcatcatcattttatatgataaatgtgtgtcactctcatcaattttattttttaaatacacgtttcattgaattaaataagccacgttcaaatgtaagtactgaatctttatatgttttaattgcaatccatatcaagacagctaccattacaattgagattaaagaacttaagatgacctcatatatttgaagccctgaagtttgagcgcgtacaactaattgaaatggcgctaaaaacggaatataacttgtgattaaagcaagtcgcccatcaggattatttatcgtgaatatcgcgatataaaatgcaatcataccaagtaatgtcagtggcatcaaagattgatttaaatcttctattctagatgttaatgatccgaggatggctgcaagtaatacatacgccataattccaacaatactacttataattccgacaataataatttgccaagacaattgattcatttccacgttaaaaccttgtagcaagtcttttaagtcaaaggcaaaaatgcatataactgccatcaatacaattaaaataatctgagtcacggcaactgctataacgcctaaaattttagcaaaaatatgttggattggtgaaatacttgtaataatcatttcaatgacacgcgatgttttctcactagcaatttccatagctatttgagatgcataatttaaaacaataaagaacattagaaagataatgccataagctaaagcatagttgaaaatcttttgtccttctgatactttatcgacttcatcattagaaatcaccttattatcaactttactttgtgcttgtaatttttgtaagtcttctttgttgatatttaattccccggctaccatatttgtttgaatagctgtaagcagtgcttgtactttttgtgaatcttcatgacttactcgcttctcactaatgattgtcccttgtaacgtgcgattttgattcaccttgataatataagctttatcaagtttatgtttttttacttctttttcagcatcttctatagaaactttagtaaacttagcatcactatgaaatgtattcgcctgttgcttgaaaaccttatagatttgttcattcggtgctgctacaccaattttatctggaccatcatcaaacatgttaataatcttatcaatgttagataggccaatcattaaggcagcaataataatcataaaaattacaaatgatttagctttaatttttttgatatatgtcaaagtaaatgtcgcccaaaacttatgcatccttgccaccaaccttctcaatgaatatatcttgtaatgatggttctacaacttggaatcgtttaacataaccttgatgtgccacaacttgataaatatctttggctacgtcttcattctcaatcgtcaactgaagaccttgcttcatgttttcactatgaatgatgcctctaatgtttgttaaatctggtagtgttgtttctgattcaatgacaactttcttgttaccattagatgcacgtacatgattgatatcaccagaaacaacaagttgacctttatctaaaatacaaacatcatcacataattcttcaacatgctccatacggtgagaactataaacgattgtactgccccaatcatttaagtctttaactgcttcttttaataactcaacattaactgggtctagaccactgaaaggctcatctaatattagtaattctggtttatgtaacatacttgctaacagctgaattttttgttgattcccttttgatagactatcaattcgttttttgcggttttcagtaatatcaaaacgctcaagccaatacgatatttgctgttgtatttctgtttttgacattccctttaaagttgccaaatatttcaattcttcttcaactgtcaatttcccatgtaaaccgcgttcttccggtaaataaccaatacgattgtacattgttttatctagttttttaccgttatacgtaatgtgtccttcagttggttcacttaagcctaaaatcatacgaaatgtcgttgttttacctgcaccatttcttcctagaaaacctaacattttgcctgattctaactctaatgaaatatcatttactgccgtcatcttgccaaaacgtttcgtaacatgttcaattacaagtcccatactttgcctcctaaaaaaatatgtatttatcttaatataacatttctattctctataaatgcaatatttttaaagtgaatttatttttaaaatttctgaaattgaaatatttaaatagtatcttctttgcatgttaagtatcattagcgctagatacgcatttcccatatctttattgccttatttgtaaaaaaatatcccagcatcattgtgccgagatatttatatcattacaattgattatctgtttcttccggtgttttcggtgtttcagatgtcactggttgatttttaattgtagacgggtattttgggctttcgccatatttatttgccggcttactgtcaaagcataggaatactatcataacaattgttaggcctaaataaacaaaataaagaagtactaacaaaatattaagacccatcggcattaatgtaaaatcactgtcataataactatcgataatctgtaatactatataaaatataatactgaatactgtcataatcattggaaataacattgttcttgatatatcgtgaaatcttcgaacgcacaacgctaaatttggaataaacgttgccaaactatagacaaaagtatacacagatgtaaggataatcatcaatatactcataactattaatgtttcgttatctgccgctatagaaataaagaatagaaataggtttattattagcacacacacagctggaaccataagtatcaaatgccatagtgccatataccaatattcactacgtcttgatctccccttaaaatttacataatttttccaaaataatacgaatgatttcataaaacctacttgaggtaattgttccattgtaatctccctttcgttaatcatatttatatttttaattattgttaccgttataatttacaagattcattatcaagccacttcatttcaatcgtcaatcactttggaaaatgaactttatatttcatcactagtaaaatgaaaacccgctacaagtacacatctatatggagactcatttgaaagtcaacgcttcgttaactatactaaaaatatgtcacactgcaatgttcacgtttaaaagagtctcaatctctgcaaataaaatattccataacaaagtatatactttacatttttataattcttaacaatactattttatcaaacatttaccacaataaaaatatctttatcatttttatttaatttaatcatataattgcgaggagaatattatggatttcgttaataatgatacaagacaaattgctaaaaacttattaggtgtcaaagtgatttatcaggataccactcaaacgtatacaggctacatcgtggaaacggaagcttacttaggtttgaatgatcgtgcggctcatggctatggcggtaaaataacacctaaagtcacgtcattatataaacgtggtggtacaatttatgcacatgtcatgcatacgcatttactcattaattttgtaacaaaatctgaaggtatacctgaaggcgtacttatacgcgcaattgaaccagaagaaggtttatccgctatgttccgtaacagaggtaagaaaggctacgaggtaacgaatggcccaggaaaatggactaaggcatttaacattccacgggctatcgatggcgctacgttaaatgactgtagattgtctattgatactaagaatcgtaaatatcctaaagatattattgctagtccacgaatcggtattccaaataaaggtgattggacacataaatctttacgttacacagtgaaaggtaatccatttgtgtctcgcatgcgtaaatcagattgtatgtttcccgaagatacttggaaataaatgccatctttcattgattactatcatgaaaatgaaatctatctccttataagtcaatcaatcgtgccgtcaacatgcggatgggttgattgtttttctttgtatccatcatattttttgattcatctcctcttattgaacttgttcttaattataaaatataacaatagaattatttataattattaaatttagatgcattaatattattgatattattttcaaaaactagaaatattgatttgttgcatgtataatgttaaaagcgcccttttataacgcttacatataaaagcttatttagggagagggatattcaacaagggggatttgaaaatgatagaacttaatgcaattacaacattatgtttagcttgtatcctttatttacttggtaaggctatcgttaatcacgttaattttttaaaacgtatttgtataccagcaccagtgattggcggcttaatctttgctattttagttgcggctttggattcatttggcatggttaagattaaattagatgcttcattcattcaagatttcttcatgttagcattctttacgacaatcggtcttggtgcatcattgaaattatttaaattaggtggcaaactcttgctattatactttatgttttgtgctatcatttcagtcattcaaaacatagttggtgtatcactagcaaaagtattaaatattaaacctttgttaggattaacagcaggttccatgtctatggaaggcggtcatggtaatgctgctgcttatggtaagacaattcaagatttaggtattgattcggcactgacagcggctcttgcagctgcaactttaggtcttgtatttggagggcttatcggtggtccagttgtaaaatttttaatcaaacgttataacttaaagcctcaacatagtgacgatacatttaaagattatagccaagtagcatataacgaacatttacatagtaaatttaatgccactgaagtattcttcattcaatttacaatcgttgtattctgtatggcagttggaagttatttcagtcatttgtttacatctcaaacagggattaatgttccaatttacgttggctcattatttgtagctgttattgtccgaaatatctctgaaagttttaattttaatattgtagatttaaaaattactaatcaaattggcgatgtcgcattaggtattttcttatctcttgcgctaatgagcattcaattaatcgaaatttataaacttgctatacctcttattattattgttttagttcaagttgtcgttatgattttatttgctgttttaattttatttagaggtttaggaaaagattatgatgctgcagtaatggtaggtggttttatcgggcatgggcttggtgcaacgccaaatgccatggcaaatttagatgttattactaaaaaatatggtaactcacctaaagcatatttagttgtacctattgttggtgcattcttaatcgatttaattggtgttatagtcattatgggattcattcaatggtttagttaaacatcaaactcataaataaaagaggaggtcttcgcctcctcttttatttatcctcgatgtatattcaagctacgttgttctatccatgacaatatttccggactaaatacgatttgtttttgtgttaagtcgtcaatatttttagcatctaacatcgtcattattgatttcatgtgttcaataaatgattctacataagctactgtatgtgcaatgccattattttcaacttgatttaaaaacggacgagacataccagttgcctttgcaccaagtgctaaacttttaattgcatcgagtggtgtacgtaaaccaccactcgcgaaaactgaaatttcgctttgataagccgttgtttcaagtaatgactcaactgtagactgtccccatgatgataagtaatccatatctttatttgcacgacgttcattttcaatatctacaaagttagtaccacctttgccactaacatcgacatacttgacgcctatttgttgtaagtcatgcattaattctttgctcataccaaatccaacttcttttataatgactggaacagacactcgtgatacaatcgacgctatattatctaaccaagtcacaaattcacgattcccttcaggcataactaattcttgaggagaattaacatggatttgtaacgcttgtgcctcaagtaattcaactgcttccaaagccttttctactggtacgtccgcaccaacattgctaaaaatcatgccttcaggattcatttttcgcgcaatcgtaaacgtctcagccatgcgtggatttctcaatgccgcatgtgttgatccaactgccatcgctaagccagtttctcttgcaactacagctagcttttcattgatgtttttcgtccactcgctaccacccgtcattgcattaatataaaccggatatgccatcgttaagtcaggcgtctgtgatgtcaaatcgatatcatttacattaattgatgggatagaatgatgcacaaaacgcatcttatcaaaatctgaatacattgcgtcagattgagccattgctatttcaacatgttcattttttctctgttctctttgaaaatcactcatgattaaacctaccttttcgtcatttctaatttaaaaccattttttacgtctgaaaaagatgattaatacgacagctataacaaacattacagctaagcaaatataatatccataatgtaaatgtaatgccggcatatttacaaagttcataccataaatcccagctatgaatgttaacggtgaaaatataactgatactaacgttaatacttgcataatactattcattctaaatgacgtgtatgactcaaaattttctcgtatttcgtttgtcatttcttgagcagtacgaatgatattacgttgcttaatcaagtggtcatcgatatgttgaatgtatagcgaatgtttattatctataatcaaatcaccattttgtttcattgtatcaattagctcttgcataggaaacagtacacgttttactttaatcaaatccgaacgtaacttaaagacactatccatgaccattttattaaagcgatcatctacatggcggtcttcaaaatgataaacactatcttcaagtgcatatacaaagttgaaatatttatcaaccatcatatctaaaattaatatgacgacatctgcacaatctaattctgcatctaatgtattcatatacttatagactactttatttaatgattccaacgtttgatgatgatatgttactaatacattgtcttgtataaaaatatttagtgctattggtgaatagtttgaccccataatactatggaatactaagtattgataatctttataagatttatatttagctcgtggcataccgttaattgcatcatccacttctaaatcattaaaattaaaatgtgctttaaaccattcattttcttgttcattcggttcatcaaaatcataccaaacaatagtcgcatcttttggtatctctttgatatcatcaactactttaaacggttcatatgtagtttgataccgtatctttaaagccatcgatactccccctaaataacgaattctctattattttatcatgaattaaataacgtgtatgtcttaatttattttagtatgatagtcactaaggagatggttattatcaaacaactttttacacatactcaaaccgtaacatctgaattcattgaccataacaatcatatgcatgatgcaaattataatatcatttttagtgacgtcgtgaatcgttttaattacagccacggtctttctttaaaagaacgcgaaaatttagcatatacgctatttacactagaagaacatacgacatacctcttagaattgtctcttggcgatgtatttactgttactttatatatttatgattacgattataagcggttgcatttatttttaacattaactaaagaagatggtacactagcatcaacaaatgaagtaatgatgatgggaattaatcagcacacacgtcgttctgatgcttttcctgaatcattttcaacacaaatagcacactattataaaaatcaaccaactatcacttggcctgaacaattaggacataaaatagcaattccacacaaaggagcattaaaatgacagatgcattacaacaaaagattcatatcgaattactagatttattagatgatgttaagtttgaattaacagaattaaatgcacaaaaagggttatacattaacggaccagcaaatcagctacttaagcgtggcgtgcatatggcttatgttcaaggacaaaagcaagccatcgataatattatgactattgtggaacaacagcttgaagatcaacatttcctagaacattatgataaatttcaaaatgaggttgctcatcgcaattatgataaaacagctaactttgcagaacttagtgatattccacgtcaattcgataattttttagatcaattttatcaaattaaagggcaatactttatcatcacacatatcaatacacttattggtgattttcactcagaagctcattaacaattagtctatataacccttgctatattttcaaaaacaaaacccaattacgatttcatgtcaaatatcatcttgcatgaaatcgtaactgggtcatttatatgttattagttattttgtgttacatcatcatctatcgatttggcaatttgtttaatagctttatgtgattgtctaattggataaattggaaaatcatgtaccatcttaggataatcataaaactcaatgtattgatgatgttgcaacatcatttgttcaaatagcttcatatcaggatgtgtcatttcacgtccaccaccaaacatataaactggtggcaatccttctattgtgccattaattggcgatatgcgcttatctgttaatggtaggccattcgcccattttttcataatctcattgacaccaaactgacttagaaccgcatcttgttcgattaaggcgtccgaaatatctttattagatagtgttgcatctaaaattggtgagattaaatacaatttattcggtaatggctgttgattatctaaaagagattgtacaaaggataatgccagtgcaccacctgaaccatcacccatgactacgacattttgaggtcctacttcagatactaattgatcataaacacgttgtatcgcttggaaagtatcgtcaatatgaaactctggtgtctttggatagataggcagtacaacctcatataatgtacttaaagtgattttatccaacaatctccaatggaacggtgatggttgtagtgcattgaatccaccgtgaatatataaaattttcttatcaatttgatgtctgaaattaaagcgaaagacttgcatatcatctaatgataatttttctaaatttgctttaacatttaatgttgaaggctgcttatgtttttttctattttcaatttctcttttataaaaaaatctttcaacatcttgatcatttttaaacataatcgagcgattgtgaagcaaatatttattgacaacgctattcataacacggtttctaatcaatgtcttaacctacctttatatattttatgtatccaatgattgtctatcccctacattctttgccaaaaaaagtatataatgtagaagatattttctttttcactttcaaatttaagactacaattgaacagtgatttttcatcattataacagacaactagacatattgataagtaaagaaaagaactttatacggaggtaccttgcatgacaaatccaaatcaacgattagaaccatttgatgagacatttcaacaatcgaatattcatcgtggtaagcgatatggtaagaaaaaacgttcattggtaagcatgattattcaaatcattgttgttatattaaccgcaatcgctggatacagcatgtggaaacaacccatttttaatattgtcttcaccaaagaatctgtagattttgatggcattaaaaattttaacgagacaattggaaaaatgcatcaattaaatattaatttgggtaatatcaatgatttacaacaaggaatcgatcgcttaattttagtctttaacggtttctttattttatgtatcgttagcctagtcataacaatactgacaattgtatttaatcgcacagttctaaaagtagtaaatattttagtgttaacaattatgttagtcattacattgtatttcagttatattattaaagcactcgcacaagaaattgcagatgctttaaaaaaatattatttaaatgtaccaccagatcaagtgattacagaagctgacgctattcataacggcatcattttactgggctgtagcatcggtttacttgttataagcttattcttccgtaatcgcatgccccgtttaaaataatgttatatagtagggattgggacagaaatgttattttcacaaaattcatttcgttgacccacttcctgctttttctttattaatgacctactacgtcaatgccaaattttaatataattcctctaacattctacaaatcaacaaataaaaaaagtatcgataaccatatttggcaccgatactttaaaaatcatgtccccacaacataatttttgattagtcacacttcaattaatttattttatttattcatgattgatactattatctgcatctaacttttgagctgtagcttttgcttttttattactttgtaaaaataaacataaaattaaggcgatgatgctaaatatcgttgcaactataaatgcatcattaataccttcaaccgttgctagtttatttacaaattgtagtaacactttcattgcgccttcttgtccgccatattgtgatgctaattcacgcatatgatcttgtacaacaggattcgttttatctaactcttccccaaaagctgataagtgttgtgtagtttgtgttgtcattacagtaactaagattgctgtacctatagagcctgctaattgacgcatcgtatttaagaaagcattaccatgagaggcaagtcgtcccggtaacgcattaatagctgcagttaccattggcatcattataaatgccataccaaatgaacgaagtacatagatacccatgattgtcatatatggtgtatccatatttaatttagttaattcccatgttgcataagtcatgacagcaataccaaaaatggctaaaggttttaaaccaatcgtgtctaacaacttaccagcaaatggtcctagtagacccataattagagaaccaggtaataataacaatccggaatctaatgctgagaaaccacgtaaattttgtaagtaaattggtaataaaatcataccaccatacaaacttaacattacaaccatattaataattgttgttaatgtaaatgttgggaatttcaatacttctaaattcaacattggcgccttcattcttaattctcttattacaaatagaataataaagataataccaatcgcaaacattgtttctatctcaacagaaccccagcctttgttccccgcttctgaaaagccgtataacaaagcaccaaaaccaatcgtactaaaaatgatacctgggatatcagctttagggtttgttgtatattgatataacttaaaccatacaaaaccaactaaaatagcgataatcccgataatgaacataccgtaaaacatcacattccaatggtaattttgtacaatataacctgataatgttggaccaattgcaggtgctaaaatcattgcgatacccattgtacccatggcagcaccacgtttttcaggtggataaattgtaataataacaattgaacctaatggcattagtacacctgcaccaatggcttgtaatacacgtccaaccatcatgattgggaaattcattgaaatcgcacagattaatgaaccaattgtaaagagtactaacgcaactaaaaataattttcgatatgaatatttattaaatagatacgccgtaattggtattaaaataccgtttactaacatgaatcccgtcatcaaccattgccctgttgacgcagaaatattaaattccgtattaatttttggcaaagcaacatttaataatgtttggtttaaaatcgcaataaacataccgaataataatgccgctaatattttaccgcgtgaaacaccttcaccaaaaataaagtttttatgttctttttttattttttcattcactttatattcttctgattcaggatttttagcagcaactgcttcctcaccattattattagtgaatgcttcttgatctttctcagacccctttgtgtaaccatttagactaacttggctatgatcatcttgattgtcaacacgcaactcttcatgcgtcatacgttgtgtcgattgatcagttgttttgtctaaatcactagctttaaatttagattgatttgattgacgtgtcgtaaattgttgttccttttgttggcgtttgcctttttttcttgatcttattaaaaataaattgataaccccaacaataatgagcgctaaaataatgtagctaataatgaaggtcgtagtcatttaatgacccccttaatttttatggatttttacttcagcgttcattccaggaacaacttgtttagacggttctgattctagagtgattttaacaggtattacttgagaaactttagtgtagttaccatcactatttgatgatggcattaatgaaaagcttgcagcagttgcttttccaatactatcaactttacctttaatagaagctttttgaccgtcaatagtcacatcaacatctttacctacttcaacatctttaatatctttttcgtcaatatttgctgttacatataaatcatctaaattgtatgcataagcgattgggttaccagcttgcaccattgaaccttccataccatctaatttggcaattgtacctttttgaggcattttaagatccatatctttcgtttcgccatcttgaccttgtacagtaacagttgctactttgtcacctttatcgagtttgtcaccttgtttaacattaagtgatttaatttgtccagatgcaggacttgctattttaatttgatcgccatttacttttgcattatcagttgttacatagcttgttgttttattccagaaataaaagccagcaatcccaattgctaacagtacaacaaccgtaatgacattaattaatatcatctttttcatgaaacatttcctcctatttgcttttaaaattcactttatttattatagagacatgataactaaaaaaacaccaacaatttttataagagtgttggttaaaattcacaaaggtgtaacaatatgaaacgacaagccaaaatagaaattcaaaacgcacttgttgatttgatggctgaatatccttttcaagaaatatccactaaaatgatttgcgcgtattgtaatattaatcgttctactttttatgattattacaaagataaatttgatttattggataccatcaactcaaagcataaagaaaaattccaatttcttctaagcgcgctacatcataatttcgaaaatattaaacaggataagcttaaactttataaattcttcattattattgctaagtatatcaagcacaatgagcaatttttcaaagacattttagttacctatccaatgaaaacattattcatagactatataaatttagcgagagattactatcaacaaattatgaatgactatagtactacagtaaccaataaacagctttatgttacatatatcataggcggtcaagctggggtgtttattaattggctttcgaatggttgtaatgaatcacctgaagaagttgctgacattttattggctaatacgattaaacttcaaaactaataatacggtttcattctaataaagaaatgctataaaacaactagataaagttaaaccaaatggatagataatagtacatatgttacggtgctatcaatataaaaatgccgagatttccacataataatctcggcatttttatttttgatgctaaattcataggtctatgaatagctcaagttttgttttttaatttttcaattcaatataatagaagaaactatgtttatcatcgatttgttttaaataccttcatattataaatctgtaaaataattaatataactgctgtagctataataataattatgtaaggtataggattatcttcaccttttacccccactaatggcgatgcaacaccaccaaataaaaactgcactaaacctaataaacttgatgaactccctctaccactactactttcatccatagctattgtaaaaccaagtgtcgcaacacctgtcactggtgctattaaaatgataaatcctatcgctaaaatccaaaagttccaatgattaagcaatacaatcgtcactaaaattacaccgataatctgaatcatcgtcatgcctctcatcaatttttgtgagtctataaaatcaacaaggtacccagtaagttgacttgatataatgagcgtaataccaattcctgcaaacatccaactaaattgtattgcagtcatgccataaattttttgaataataaacggagacgcagaaatataagtaaataatattacaaatgtcataccttgaatgagcattggtaatacaaaacgtggcgtcttcaataatattttgaagtttttaaacattgtctttaatccactacttgactcacgatttgtcactgttaatgattcaggtacttttaataaagaacctatgaccatgacgaagccaaagatagtcagaatgacaaagaccatacgccagacagaataatttaaaattatgccccctattgttggcgcaacaactggtgcaataccattaacaagcatcaataatgccataaacttagttagttcattaccactatacatatcacttgctatagctcttgaaataactgctgctgcgccacctgtcactccttgaagaaatcttaatgcaaccatcagccaaatattatgtacaaaaacaatacctaaacttgctaatgtaaaaataatcatagctataataagcggctttctgcgcccagttgaatctgaaattggaccagcaaacaaattaccaaacgctaaaccaatcataaacatcgataatgttaattgtgcgttagacgtcgttgtttgaaaatcatgtctaatatctggtaatccaggcaaaaacatatctatcgataatgctccaatggcagtcaaagatcctaaaataataataaatatcggtgaacgcttgttaaaatgcgttaaatcattcatatgactatctcctttatataatgattagtttataactatcacgaacagaaactaaatttaaatatgctcttttatatattagcattagtcacaagtttcatgaacatcattacaacttataaaaggtataaaatgatataaacctcagcacttcataaatttttccacaaaaaacaatcccttcaaagtaattcacactaattgtaaatactttgaaaggatgttgtttgtattccatgacacatgcatcttatttaagttttatactctatttttctgatgtcttgattaattgcaagcggtcttgcgagccttgttcaagctcatattctttatctacttgcttaccgttttcatttattaatcttacggttgcggtaatcttatcaccatgtttttcagcatctataatttgtggtgaactaatcatcattaaacttcctttagatacacgcttctttacatcatcataaaaagatgatcctttttttatatatgatgatacaaaatcaaaatccgactgattaaacgcagcattattcgctaaagaatatccagcaaagaattctatcaatttgttcttcaagctgttttcttctttttctttcttttcaacatagtcttcgatatcttcactgtcaaaattcaaagttatttctgtattgtattttaaatcgctagctttaatcgtcttcgtctgtgttgtaaatgttttatctttcgctttacctgaagctgaaatggtaatatctttattttgtggatatggaccatacgttttggaacttgaaaatgccatttcacggtcatttatagttacttttttagaactatcatttaattttgtatcgccttttaaagttacagttatatttgcttcttcaaaatcttcagtaacatctaccgtttcagaattactttgtctaaaatcaaattttaaatagcctgcaaaatcaccgttctcagttgatttcatagctggaattctatatgtccccggtataaaattacctattggcgtcactttatttgcttcagctataaccgtctttttcttaccaccagatttaaactcatattttgttttttctttcggtttaacaattggttgcttggtaggtgcagtaaagctcatattatcgaaaaagatataacgcgtgccatttttacttacacgtaatatattttgaccagatctggtttgaatataagaagctacgctggtcttactcttattcaatttatgtaccgtatttttaaggtcgctgacaaattgcttaagcccaacttcatctttgatatagttaatgtatactttcgcttcttcagaatctactttattatctttagtacttaataatgttgctactttttgtttatcattattctcaatcgcattcactaatattttagtttgcgcttcaggtgaattgaagtttcttagtaaaaagaacaatataataattaagattaaaatgaaaaaaccaattgcccaaggcaccatttttctcatcttgatgttattagtttgtatatcttcatcggttgactttctatataatgcttgacgactatcaaatttatgtccacattgtgtacatatctgtacatcatcttgtgcttgttgtccgcacttcgggcaagatttcatactttcacctcaattctgttcctcttcaattgttatatgtatatcacaaaaattatttcattattttaccattattattttacaaatattatcccaagaatacaattcaagaaatgattaactttactttagaattgtaccttattacattatttatgaaagtactctctcaattataactaaaaagaaggtgttcaatacatacatatttagtcttatatttgaacaccttcaaaaacctatttatgattgctatatgttttaatgcgatgattgatgacttctaatacttgccttacattttcaatatcttcagaatttaaatcattagtaatatcttgcgcaatatctgtcataatcgcattacgttctttcaaatatgctctacctttgtcagttaaggttatgaatttcaaacgttgatcaatatttaaatttggtttatctaacttaactaatttagcatcgattaactttttaattcgtcggcttactgcggccttatttacaccttgtctttgcgtgatttcactaattgtcaaaggttctttatttaacatacctaatacgttagactgctctaatgaaatttcatattcattttgtaaatctttcaacatttttgcagttaatgcgttaacgttatttataaactgctctaaaaattgaatatggtcttgtaaatgttttaccataattatttctccctaattactatttttataaagtatcctcagcaatcattgtatcgcacatctaaaaaacacaaaaatattgacccatatataatataacaaattaagacttacatgttgctgcgttctccttgctttaataaattaaatcatctacatttatatttaatatttattataagcgaggtgtcagtatgttattgaatttattattaatatttatacttatcgttatttgtccgttaattttcaactatactctgacgttaaatttaacatgctacatcttagttgtcatatcgatatttttgtcactcatctatagcatcatgacctatactttcccttggtctatgtttgtaacatttataataatcagtattatcatgctattcaaacatagatatttattttctcatacttctagtcgcttatttattaaaaaattattatctttttcatataaatttgtactctacacatcagcacttctatttataagtacgattcagtcacctattgtgaaaggtttgtctatgtggttagctatattatgtctttccctgttactaacctttatttgttatctcgtttggacagtatcatatagacatagatcatacaacaaagaagttgatatcataattgtgttaggtgctggtatttttaccgaatttgtcacaccaatgcttgcagcgcgtttagaccgtgcacttgatatctatcaacaacaagcatcagcaacaaagatcattgtatctggcggacaaggaccagacgaaccaatttctgaagctttagctatgcaacgttatttgattgcacatggtgttgataaaacagatatactaatggaatctcactctataaatacatacacaaactttttatattctaaacaaatcatcaacaatttgtatcatgaagcagttaaaattgtttgtgtaacaagtcagtttcatgtattacgcgccttacgactagcccaaaaattaggtttatctatcgatggtgtcggaagtcatacaccatatcactttttcttacatgtgctcattaaagattatctaggcgtaatgtatcagtatagattgttattaacgttatattgttcaagtagttggtttatatgtctttacgccgcttttatttataatagttaatccacaaacaaactattattataggttgtttctaatattgcgtcaaactatctttaaatattcgttaatccttgattagacaattgttatattgaaaataaataaactaaagcacgtcatcattttatataatagtgacgtgcttttttgtaaacccaaatcgtattctgttatctaacttttatactactatgtcttaaatcattaacatttagcgtctttacaagccactaatcagttattttgccatcttctaattcaatcactcgatctgcatattcaaataatcttcgatcgtgtgtaatcataataccaatcatttgttgttctttaatttgttgacgtatcatctcaacaacttttgttgctctatcggcatctaaacttgctgtgggctcatctgctaaaatgattttcggattattcataaatgctctcataatcgcaacacgttgcttttcaccgccagataactgatgcggatatacattcaagcgatcttctaaaccaatatttttcaaaagttgtattgctcttgttgaactttgttgtttggtcattcccgcttcttgacctacgagtgtcaattgctctatcacttttaaataaggaactaaatgtgaagattgaaaaataaaaccaatatcttccaatcgtaaatcactaggacgatgctgtttatcaaacaatggcgcatcattgtaaagcactgtaccactcgtttgacttaacaatccgcctaatatcgttagcaatgttgttttcccagaaccagaggcaccatttaaaatgacaaattccccttgttccacttcaaaattaataccttttaaaacttttgtttcagacaaaccttctccgaaatttttgacgatatcttcaacgactaatgccattattctgcacctccaattgcttcgataggatccactttaaataatttgataaatgatagtgaggcacctaaaatcgctactaatataaatatccccaccattaataaaatattttgcgttgttaagtaaaaaggcatcgttaccggcatcataaatgatagtcctactatgatgatcacagcaatacctaccccaattattgttagtgttaaaatttgtaaaactaacgcactcaataaatgtcttgtcttaataccaattgctttcaaaatgccaatttgtgatattttttgaatcgtcataacatagaaaaatgcacttagaacgattgctgtaatagcaaacaaactaacaatcatcatatttaacggtgcttgctctgcttgataactcgcaatattacctgttaaatctttttcactcaccacttgaacgtcatttattttattaagctcatcacgttgttgttgtgttaaatttttcactggataaaatgccgtattaaccttattcaatgcattaaatccgttatcgttcaatagcacaatggaactatgcgcatacattgtgtcgtttaaaataccagaaactctataactagttgaattatttttaaaatgtaatctatccccgactctaatgttgtctgcagctaacttatcattaatagcgacctcatgagcatttttaggataatcaccttttttaagttgtatgcgttgttgtttaacgtcattcattgtaatcacatcttgttctttattagataatttcaatgtttgaatattcattttatatggttcttgatgaattacctttttaatttgattctgttgcgtatcactaagttgcgatttctcaatttgcggctctttcattttttgaacaacatattcatcattatcaaagtgttcaaataacgaaatattctccctaccaagcccttgagctaaaccactaataaataacaccataatacttaataaaagaataattaatgtgattaaaatataacgaaatttgtaaaacataatctcttttatcgctaatttcatatcgattcacttctccctatttcttctttagcgtcagtataaggttgaaatatgaactcaatatgaacaattgtttttttacgcaaaaatattttacatgtataataaatgaaaaagataagggagtttatagctatggtgcaatgtcttgttgtcgatgacgatcctcgaatcctaaattatatagctagccatttacaaacagagcacattgatgcatacacacaaccaagtggtgaagctgcattaaaacttttagaaaaacagcgtgtcgatattgcagtggtagatattatgatggatggtatggacggctttcaattatgtaatacattaaaaaatgattatgatataccagttattatgttaacagcgcgggatgcacttagtgacaaagagcgtgcgtttataagcggtactgacgattatgtaaccaaaccctttgaggttaaggaacttatttttagaattcgtgcggtattacgtcgatataatatcaattcaaattcagaaatgactattggcaacttaacgttaaaccaatcctatttggaactccaagtatctaataaaacgatgacgttaccgaacaaggaatttcaattattatttatgcttgcagcacgtcctaagcaaatctttacacgtgaacagataatagaaaaaatttggggctatgattatgaaggagatgaacgaacagttgacgttcatattaagcgactacgccaaagattaaaaaaattaaatgccacacttacaattgaaacagtaagaggacaaggctataaggtggagaatcatgtttaaaacactctatgctagaattgcgatttattccattacggttattttatttagtgcattaataagttttgtattaacaaatgtttactatcattataatttaaaagcatctaatgacgcgaaaatcatgaagacacttaaagaagcaagacaatatgaacaatcagctaaaccaacgcacattcaacaatatttcaaacatttagggcaaatgaattaccaaataatgaccgttgatcaaaaaggtcataagacattttatggggagccatttagagaagatactttatcacaaaatgctattaacaacgtattaaataataaagattaccatggtattaaagataaaccattcgcattattcgtaactggatttttcgacaatgtaacagataatactgttggtattaactttaagacaaaagacggttcaatagcagtattcatgcgtccagatattggagaaacatttagcgagtttagaacattcttagccgtcttgttaatgttgttattatttatctcgatttcattagttatcgcatcaacctattcaatcattcgtccagtaaaaaagttaaagctagcgaccgaacgcttaattgatggtgattttgaaacacctatcaaacaaacacgcaaagatgaaattggaacattacagtatcactttaataagatgagagagtcattgggacaagttgatcaaatgaggcagcattttgtacaaaatgtatctcatgaaatcaaaacaccattaacacatattcatcatttattaagcgagttacaacaaacttctgataatacattaagacaacaatatataaatgatatttataccattacaacgcagctgagcggattaacaactgaattgttgctcttatccgaattagataatcaccaacatttattattcgatgataagattcaagtcgatcaactcattaaagatatcattcgacatgaacaatttgctgctgatgaaaagtcgttaattattttagctgatctagaatcaatcaatttcctaggaaatcaacgtttgttacatcaagcattgagtaatttattaataaatgctattaagtatacagatgttggtggtgccattgacatcgctttgcaacatagtcacaacaacatcatttttacaataagtaatgatggttcaccaattagtccacaagctgaagcacgtttatttgaacgtttttataaagtgagcaaacatgataatagcaatggtttaggtcttgcaattacaaaatccatcattgaattgcatcatggtacaatccaattcacacaaagtaacgagtatgtaaccacctttactattacactgccaaataattcactttaatctctacctcctgaaaaaacatttctgtttttatttcaggaggtatcttttatattgattagcgctttctagccacttaacatttaatttctaccattcaacaaaatttaaatatatcgatggtcatttatggtttaataattttgaaggaggcattaacctatgatgaaactcaatttatttatcaatgcaaaagagacggaatcttatattgatatacatgcacctaaaatgaatgatcacgttcaaagtattattaatgcagtcaatgatttagacaaatcacatacattagtcggatacatagacaaagaaatccatatcattaatgtatcagatgttataacattccaagttattaataaaaatgtaacagccattacaagcaatcaaaaattcaaactaaaattacgactttatgaactagaaaaacagttaccacaacatttcattcgcatttccaaatcagaaatcgtcaacaagtattacattgaaaaattattattagagccaaatggacttatacgtatgtatcttaaagatgcacactacacctattcttctagacgttatttaaaatctataaaggagcgcttatcaatatgaaaaatttgaaaaactcattatttattagcttaatcattggtttgtccctttcactgttctttagtatgttatttgcagacggcaaatattatccactgaacccacaatcaactattggcatattgtattatacgcatttcacagaaactaccgtaatgttgatttctatcattttatggttactcataggcgtcgtctttttccttggagattttatctttaaatacacagattggagcattactaaagcaactataatgcatttcataacaacgtatgtcggattcttgcctttagcaatgcttgccggttggtttccactaacagtgcattatctaatcatattcacaattatcttcattgtggtttatgtattaatttggataattcaattctttaaaaataagaactacgtaaacactattaacaagcaactgaaacaattaaaatgattttcattaacaactaaaaaacggtaatgtctatcacattaaaaaagacattaccgtttcatttattatttaacttgtaaatacttagttacttcttcattaattttgtgatataaatcctcatgatctgttaagcgataaccaaatgacggcaccatttctttaatctttggttcccatcctttgaattcatcacgatagcatcgctgtaaaacatcaaacataatatctacagctgttgacgcaccaggtgatgcaccaagtaatgcagctaatgtgccatcatctgacgtaatgacttcagtaccaaattgtaagttacctttagaatcctcagtatccttgattacttggacacgttgccctgctgtaatcacttcccaatcttcatttttagcatttgggaaaaagactcttaaatcatccatacgctcatcattagataacatcaattgtgacactaaatacttcgtaagactcatttctttgatacctgcagataacatcgtcacgatattatttggtttaaccgatttaattaaatccatatgtgaacctgtttttaaaaatttaggtgagaaacctgcaaatggaccaaataacaatgaacgcttgccgtctacaaaacgtgtatctaagtgcggcactgacattggtggcgcacccactgctgcttttccgtacactttagcatgatgacgatcaatcacttcttgatttgtacagcgcaggaataatccacttaccgggaaaccaccaatatgttttgattgtttaatcccagtcttttggagtaatggtaaactcgcaccgccagcaccaataaatacaaaatcagattcatatgttgtcgtttcattagtttctaaatctttaactttaactagccatgccccagatttctgtttcttgatgtctaatacattctgcttatattgaattcccacaccacgttgctctaaattttcaaataactttgcagttaacgcaccaaagttaacatctgtaccagtttcatcataagttaaagcaattggttcatcagacttacgaccttcaatcattaacggtacccaagatttcatttcttcttcatcttgcgataatttcattttttcgaataaaacacttttctttaacgttgcaacacgactttttataaaagctacattatcttcgccaatgacaaaactcatgtgtggcaccgcttgaataaagcgatctgggttatctaattgtcctgttttaactaaatatgcccaaaactgttttgaaatttggtactgctcatttatcttaattgctttactacaatcaactgtgccatccttaccttcttttgtatagttcaactcgcaaagtgctgaatgccctgtaccggcattattccatacatttgaactctcttcgccaggttgtgctaatttttcaaacactttaatatttttctcaggtgataattctttaagtaatgttcctaatgttgcactcataataccgccaccaattaagatgacatctgttttgctatgttgtgttgtcataacaaatacagtccccctttttaaaatgaataatggaacgttcgagaaatacgacatattaataccactttaaatcaataagtgtctcaataggttcccatggtgatgctctattactatctactatgtatattaatattttataataacgaaactactttaattatatactttatgtgcgatagcacaaagacaaaaccacaaaccttaacagctatcaaccaatttaatttgattgctgattactcactattcattttaacataaagcgctaccattattataatgtcaaacttctttcattaatgatccattaaaaaaagatgagatgttagaaaacatctcaccctctgtatatttatattttgaaatacgtttttttataataatgacaagatgaaagtccaaatacagatgaatattagtaaacatacactgtatttcaatgtcatttttaataattctgattccttaccaacttgttttactgctgcagttgcaattgcaattgattgtggtgaaatcaattttgccgctacaccaccaactgtattagcagatacaagaagtgaaccacttgttccaatttgttgtgcaacagaagcttgaattggtgcaaataatgaattgttatttacaactgatcctgtcataaacacacctatccaacctaagattggtgatagaactgggaagacattacctgctttagctataccttgacccattgctgcacttaaaccaccataagttgtgattttagaaattgctaagatgaaacaaattgtaagaactggtaaccacaactctttaaatgtaacgccgaataatctaccagcatctttaaagttaacctttttagacattaaaattgtaataataatagttaataaaatagctgtacctgtttgtccaataatatttaaagtcaatactaatggtttatgcgtaacttcgctgattgttccaggtaagttgaatttaaatactaatgatgataaagcaccatttggtaagaataagtttttaaagaatggcgcactccaaatcattacaatgactgttaatacaataaatggactccatgcatgtaatactgcttttgcagaatgtgcttttgcaggttcaatttcttcatctttattaacacgataaatgtgttttggttggaattttttagaaaatactgctaatgctaacattgttaataacggtggaataatatctgccaattcaggtccactgaatacagttaataatccttgagtaagtgtatatgtgattgaaactactaaaattgctggtaatgtttctttaacacctctaaaaccatcaataataaagataagtaagaatggaataatgaaatttatgattgccaatgttaaagttgctgattgagaaacacctaatactgaaacatctccaggtaatttcaacgtttctacaacacctacagggataccaatcgcaccaaaagcaccagacgctgcatttgcgactaaacataacatcgcagcttttaatggattaaatcctaattgtgttaataaaagtgcacaaattgcaattggtacaccaaatcctgctgcaccttctaaaaatgcgttgaatgcaaatccaataagtaaaacttgaatacgttggtcttgtgaaatatttgtaatactatcttgaattgttaaaaattgtccagattcaacagtaattttgtataacaatactgccatcataacgatatagccaatcggaatgataccttggaagaaaccttcgactactgcaccagaagcgataccaactggcaatttgaaaaatggtattgcaattagtaatgttacaacaagtgttgtaatagctgcataaatacctttcattttaaaaacagttaaacatagtaaaaacagtacaatcggtattgctgcaattaaagacgataataataaattatcaaatgggttaaacgtatttactaacataggctgactcttctttccataaagtagtagtgtaattgcttcattaaaatcatgctctggctatagcattttgttatcgataacattttacagaacagtgagattaatgtgatttttttcacaattaaaatataccattttttcagactattaacaatatcactttcctatttaattgttttatttttcattttaaatctgttcatcaaaatgaattgtacttaatgtaatgaagtaacttatactattcatgaattttacataagaccgtgctaaaataaggaagatactacgatgagaaatggaagttatagcaatgattaaacagataaatgtttctaatatgcaaaagtttgaatctcaattaatgaaagctcagtctgaaggttatacacatgtcgttccatatgcaaatgagataatgatttatcaatcgatgttagatgcggttcaattatatcctaagtctatcgtggttgattatactgtggatggacaatacaaaaatgattgtcactatttcggtcaatcatcgatcaacattgccgattgggctcaaaacaataattattatcctaacctgatatatgcgattcaacagactcttgatttaatacattattactctgtagaaacgattttcgatttagctttattgacacttctgaaaggtgatttatcaatcgatggtcatgtcgtttttgattttaaagcccctatagcaacaagtgcttcaatatgggaaactattaaaactattgaagattttgatatgatgtctcagttttatttgaataaaatggcttatattgatcatcatcctataccttttcgcaacctttttatcgaggattcagaacaacttaattcgccagataattggttgtattctaccaagtttatgctacctaaatggttatataaaatagcaaagcaacgtgctgataacaaacaattacaaaacttcggcctgtatacgaagcaaccaaacgttttaaaagatcacatcgtttttatcggtgatcatcatcaatatataggtaattcaaaatatttatttacttacttcgttaaacataatccaatgactgcctgttattttgttactgacgatcgtcgcggaccacatttcatatcacctaattctgaaagagctgacgaattgattaacagcgcacgcgtagttatagttgaaaatgatatacctgaaacgttacaaccaaacggtactttaattcaattacatcaaggcacaccaataatgcaattatttttagatagtaaagagcctattaaaaatatagaaacacctttttatcgtgctaaaaggtataatcgctggttgcaattcgattatgttatacattctgctgatgatattagccacttttatcaaacggcttttcctagtcaccaagcaaatgtattggcttatggtaatcctaaacaccaatatttactacaaaagcgtaacgaaagtactactcaacaacagtataagaaatcgtttaaaataaatgatcaaaaaccagttttattatacgcacctattggattagtgagtgcgcaacaattaccactatcagatgctttattcaaagcatatcatgttgtggttcagggtgttgatgaagcgatcttaccagaagaggcgcttgttgcaccaaagtatcttagtgctcaagacttaattctaatgtctgatgtcgttatcactgattactcaaatataatatttgatgcgatggctatagacaaaacagtagcattatacactccaaatcacagtcaatacattgagtctcaaggtgttaacgaagatatttggcgtcatctatcaaaaatttggtatacagaccgacaattattaattaataatttaatttcccaggcaataccagtgattaaatatccacaaatacaacataaagaacaaccattagaatctatttcacaacttatattgtctaagatgacatctaatcaatagtgtttaaatttctcagtggctgtgaatgaggtttaaaagtactataaaacgtaaactttgatactttaaaatacgcaaaaaacggtaaaccctaattcatattatagagtttaccgttttatttttttaacttgcatcatagttatattaacattattgttggtagtttggatcagtaaccattgcttgtccagtataatcaaccgttacaattgaatattttccatttgcatttgggtctttaaaactaaacacatacttatagttgccattatgttcttcaatagaataatcattatacactttattattactaccaaatttatttgcttcattattagccgcatttaaagctgtttggaaatttggcaattgctgtaaagcttgagttttatttccattaaacggataaatttgacgtgcaaccggcgcggcattttgtccataatatggtgcaacgtaacttgatttttgattattattcgcttggttattatttgtttggttttggtcattgtttgttgcatttgaattagattgttgctggttatcgtttgcactattatctttattatctttgtttacgtctttactatcatctttattatctttcttatctttagatgaatcatttgtttttttatcttgttgttcagttttcgctttatcatctttttctttattaccgtctttttgttggtcactatcttgaccacatgcagctaaaaataatgataatgctagtaaccctgtaactaatcttttcatacatatctcctcctataattcgatattcattgaataatcttgaaatacatatctaccatgtgtatcttttcatggcttgttaccaaagacgtcaacattaatatgatctgaattatcacaatatccataactacaatctaaggttctttttattataccctaatttttgttcattattatttaatttttgtgaattttatgttttctataaatttaattattttactttaacaattcattacgcatttagcatttcaaggtatacacaatatttattactatgatttcattttatctgctgcaaaaacaatcattataactctttttccataattaaatctgtatccgttacatcacctgtttgaaaatgatgttcaccaaccactttaaatccatgacgtttataaaatgcttgagcacgaggattatgttcccaaactcctagccaaattttatgtttattatgttcttgtgcaattttttcggccaattctatcaattgtgaacctcttccgccaccttgaaagtctttcaaaaaatatatgcgctgcacttctaaataggtctcccccatttcttcagtttgagcactattaatattcatctttatataaccaacattcgcaccatcttcttgataaaaataatgaaatgaatctacatggttaatctcttgtgtaaatttttctacagtataattgtctttaaaaaattgatcaaaatctttgtcatcatagtaagaaccaaacgtgtcataaaatgttctagttgctaattcaactaattcactagcattttgttttgaaatttctttgattatcccagccatataaatcctccaataaacagtgatcgaatcaaaatattacttatgttatttttcagccaaaactatttaaaaatacattaacacaaatcaattacagattgtattgattgtgtgtaacatcaataaatgatacatttattccagtaaaatggccgtattttcaaaagagaaaaagagaggatgtatcgttgtgatagaaacatttaaagcatttgtaattgataaagatgagagcggtaaagtgacaccaactttcaaacaattatcgcctactgattttcctaaaggagatgtgctgattaaagtacattactctggtataaattataaagatgctttagcgactcaagatcataatgcagtcgtaaaatcgtatcctatgattccaggaatagatttagctggaacaattgttgaatccgaagcaccaggctttgaaaaaggagaacaagtaattgtaacgagttatgacctaggtgttagccattatggcggttttagtgaatatgcgcgtgtaaaatcagaatggattatcaagcttcctgatactttaacattagaagaatcaatgatatatggcacagctggttatactgccggtttagcaattgaaagacttgaaaaagttggaatgaatattgaagatggtcctgtactcgttcgcggtgcttcaggtggtgtcggtactttagcagtactcatgcttaatgaacttggttataaagttatcgcaagtacaggtaaacaagatgttagcgatcaattacttgaacttggtgccaaagaagttatcgatcgacttcctgttgaagatgatcataaaaagccactcgcatcatcaacttggcaagcttgtgtagaccctgttggtggcgaaggtattaattatgttacaaagcgtttaaatcatagtgggtcaattgcagttattggtatgactgccggtaatacttatactaattctgtattccctcacattttaagaggtgtaaacattttaggaattgactcggtatttactgctatgaaattaagacagcgcgtttggcgtcgtctcgcaaaagatttaatgcctgaaaatttacatgagatcaagcaagttattacatttgatgaacttccagaacaacttaacaaagtaattaaacatgaaaataaagggcgcattgttatcgatttcggtgtagataaatagtattcatgaaaaagacatcccgttatgcgagatgtctttttattttcttttagattatctacttaatcaacattacacaaattaatcaataaaagaattaaataattaaaattcaactaaacggtacacaaagacaacagacagtagagtaaattgtttgttaaatagcaataataccttgatttaataaattttattattataattaatgtaaataactttcaatgaataggtgtgatattttgaaaaagttatataaaaatcgttcgttttctaatttacttatgagtagaattttgataaatgctggtgatagtctctattatgtttctacaacttggatagttttacaatggacgcaaaaccctttactagttggtttaactaatactttattaatgattcctatgtgtatttcatttttatttggtcctttagtagatgccttaccattaaagaagactctatttttaacccctttattacaatgtctattactatcactaattgcttctttaaacctaattggatacttaaatgtatacggcttgatcattttagtggcaattgcaatgttttgcactcaaataggatacccagctcagtctaaagctatacctttattagtaaaaaaagatcaattattagatgcaaattctgctatgagtgtcgcatatcaaggaacagatgttattatgaattcaataagtggtattattgttgcagcaatagctttttttccactatattctattaattcactaatatttctaatagcttgtttatttatgctgaatgtaaatattcctaatataactaaccctgcaagaaataatccttcttatttacaaaatttaaaagaaggtgtgctaggaattaaaaattcactcctactagttgttgcattggtaagtggtgttataaattttggactaggacttctttatacatggatacctttaaaggctgaccatttaggtggagcctattattacggtttattaatggcactattttcaataggtttaattgtaggttcattaatcacaccttatataaaaaaaatcaacttgggatatggaaaattattaatactcttaaatactatttcaggtttaatattaattttagttaactatattccgcgaaatttttttataattttgtttccagtagcttttatgacaattagtattaccaatatatccttagcttctattcaacaaaaggttattccagaacatttgcttgctagattaactacaatcataacaagtatttcagcaatttcattaccgatgggtagttttattggcggaatcctaataaaaaatcttggtattgattatactcttgtaattggtggagcattatttattattgcaagtatcattttctttatatctacaccttacagatcattgcctaaaattgaaaaaatagagcattatcatatattcggaattcagaaaattggaaacaatcattaaaattatacatttttattagttcaatatacttaaataggttttcaaaatagatttagtattagaattgatctatgaaactgactcacaaaatgtcaaaactcaagaagaattgtttactgaatacaaaaattttaaacaaaaaatcactaatgatttattagataaaactagttaattaaatgcttttcttcgtctaatcattggtatatctatctaaatcgggaaatattttcccatcaaaaagacatcccgttttgcgagatgtctttttatttttaaaacttaatatacattccacctgaatctggttccgtaggtataaatccaaattttgtatataatttatccgccgggtagtctgcgatcagactaacgtatgcactttcgacagatacatttttaatatacttcataatatgttccataatttgactgccgtaaccttgaccttgataacttttcgaaacagcaatatcaacaatttgaaaagcagttccgccatcgccaattactctacccataccaattaaccaatctttatcatacaaggttactgtaaataaggcattaggtaatcctttttcagctgcttcgcgcgtctttggactcatacctgcgttaatccttaatgcgcaataatcctcgcaagtcggaatatcatatgtcactttaaccattatttaccccacttttcatcacacaatatatcaacctagtataaatgtttatttacaatagtcttattcgcttctttaaacacttcatgatgacttgaaacataaccctctgcattcgcatctggttggatatatgttttagcaaggttcgctgcattagcaccatcactaaatgcacttgcaattagatgtgattttgcatcatgataaacaatatctccacacgcatagataccaggtatactagttgtcgtattaccaaatcctttaacacgacaatcatcatgcatatctagctttgaagatgtttcactcaataatgtattacaacgatcaaacccatgactaataatgacatcgtcaaatttaactgtatgcgtatcgccactttcaacatgttccaaaacaacttcacttatatgcgtttcatcatcattgccgaccaagtatttaatacgtgtttttgggcatagtttcacatttaaatctgtcaccaacgttttcatcgcttcatgaccacttacatcttcttttcgataaacaactgtcacgcttttagcaatcttggcaatatcatgcgcccaatctaatgctgtatttcctccacctgatattaatacatctttatctttgaaacgtctgtaactttgtacaacataatgtaaattagttaattgatatctctctacacctttaacatctaattgttttggattaataatacccgcaccaattgcaatgataactgctttcgatgtatatatttctcccgcttctgtttcaacttcgaaatgacgttctgcctttttcctaatatctaccacacgttcattcaaatgaacttccggtttaaaatataatccttgcttaattgtatcttttaaaatttcatgacaaggttttggcgcaatgccgccaatatcccaaataattttttcagggtaaattctcatcttaccccctaattcagattgaacatctatcaatcttacagacatatctcgcaatccagcataaaagcttgcatacaaaccagacggaccgccaccaatgattgtaacgtctttcattatgtgcctcctatgactctctatattcatttctttcattaacgcgctcaaattgataattattatcatttaaagccattatactattaatatttatattgttaaaataaatcgcatagttaaccatgaattatcaataactatcccatcacaatataaaaacacacctttcaaagtaagaaacaacaatgttcctttgaaagatgtgtatattttttagttctagttatattattttttaaaagactcatcacgtggttctttaagaattgcttgtcttaaaaggaaaaatagcaacaataaacctgcaagcatacctgtgtgcccaatacctgcaaagcctgcaaatgcttctggagagtatgatttaccagtgacttggaagaatccttttgtcaccatcatacctatagtaacgataacacctatgttatatacatagaagaaccagttaaataagtagtaacttgataatttaaataacttctccaatggtaataatattaaaaacataaacatacctaaaataagtgtatgtgtgtgtacaagtgataattgtgttgtaccagtaaaatcatatgcttttgttagctctctatagaaaaagccactaaataaacctatgatcatataaaaaagaaatgaatataataacctacgcattttgaatcctccctcaccttttcattatatccgattatacctattataacagtgacaaaaaagcgaagatatgacacaactgaatttggtttagcacatagtatgacagctaaaataactttacatcaagcgctatacaaataaaatagctataccatgacgctcgctacaaacgtcttgtatagctattatttctatttattaaattatgacggcacttcagtacgttttgtgctatgttttctaacaatagctgaaactaaacttgatacagcgccaaaaatcataaaccctataaacatccacattgtactatttaattcaatatgatgattcaagtataatagttctcttacacttgttgcatagtgtgtgaatggattccaatcatatacatatttttgataactttcaggcaacatttgtttaggtaacgttacaagttgcatactaaagaacattaaaatgaagaaaattggaactgacttcatacctagccataccataacacctaaaataaggcccacgaaaccaagaatcgcaaatgctacaaaaattgcgatacgatttggatggtcaaaatcaaatccttgaacgccttgcatgaaataaatataaacaaagctacctgcaaatgctgcaacaactgcaaatatcatctgtccaattgaagcaatgatacgatgttgcacgacgatattgttactagttctaaatgcaaagaacaataagatagacgttacgattgaacctatccaaattggcataaacattaggaatggtgcattaccacctgcttggtgatctttaactttattaagtttttcattatccacttttactggattcgtcaaaccattgatgtccgcggcattgactttaacattttgactcgttaatgtttccaaactttgcttcgtaatttgagcattaatattatcacccataccagttaatacagctgatgcaatttgtgaaccttgtaagcttgatccttcacttacaatcgttttaaatttagcctgcttaacctctacttgttgattccccattttttgtttcatttgttgaaccacttgtggcggaatttcacctgaagcaactttttgttgcatttcttcttttttactatccataactactttttgtgttttactcatagcatcttttgaaaagtctttatcaataatagctactccaaagattttttgatctttcaaatctttttcaaggtctttttcactatcaaccttaacccatttaattttattagaatcactatctaataatttatcctctaattttttaccaatgttaacatttttatcttgaatcgttgtacctttatcctcgtttaatataccaattggtaaatcttttggtttaggattatatgcaggataaaaagctaaagaaaagattaccaagataatcatagttgctattggtgcaatccataataatttatttttaaatatattcattttattaattacctccttattagacaatgtgttgaatatttcgcatgttgtctattataatatgtaagtgggaataaacaatacacaatgttcatcaatacgtttattaatagacaaatacacccgcattgttcaataacacgaggaggttgatttatttttgaaagaagataggcgaattagaaagacaaagtcctccattaaacaagcgttcactaaattactacaagaaaaagatttagaaaagattaccattcgcgacataacaacacgcgctgatatcaatagagggacattttacttacattacgaggataaatatatgttactcgcagatatggaagatgagtatatttcagaactaacgacatatactcaatttgatttgttacgcggttcttcaattgaagacattgcgaatacttttgtaaataatatactcaaaaatattttccaacatattcatgataatttagagttttatcatactattttacaattggaacgcacgagtcaattagaattgaaaatcaacgaacatattaaaaataatatgcaacgttatattagtatcaatcattccatcggaggcgttccagagatgtatttttacagttacgtttccggagcaacaatttcaattattaaatactgggtaatggacaaacagcccatttcagttgatgaattagctaaacatgtgcataatattatttttaatggtccattaagaataatggcagaaaaccgtttgcataaatcaaaccttgattcactaacttaagtaatactcgcttttcctaaatcctttagaaaggaactatatatcatgattacttcattcagacattctgaagatatagataaacatattataaaaacaccattagatcatacagcgtcatggattaatgtagtagaaccagaccgagaagaaattgaaaatcttatggaacaatataatatacctgaagactttatacgtgaccctttggactcagaagaaagttcccgtattgaatatgacgaagatactggttactcattaatcattattgatttacctatcgtcaattcaactaatcgtagcgttctatcttttgtaacgattccattaggcattattattggcaacggtattatcgtaacagtttgtgacgctgaaaatgaatttttagaaaatttacctaagcgtgatattaatttaaaatttcacagcagatttgcattagaaattttaactactattgccgaccattataatcgtaacttacgattacttaataaaagtagaattcgtattgagaaagaactaaaaaataacattactaacaaacaacttttcaaattaatggaagttgaaaaaagtttagtatactttttagctgccttaaaaggtaacgatacaattattaaaaagttattccgtttacctgcaattaaacgttttgaagaagatgaagaattactagaagatttaatcattgaaaataaccaagccatcgaaacaacagaattacatcaacgtatcttagaaagtatcacaacatcatacgcttccttattatctaatgatatgaatacgattatgaagacattaacacttttcacggtactattaacgttaccaacactcgtatttagtttcttcggtatgaatgtgccgttgccaattgatgaccatagttatatatcttggattattgtggtaggtatttcattaattcttgtcgtaattgttagtattttcttatggcgtaaacagaaattataactaaattaaaaggtatgacagcttaaagtttcatcctattgcatttgcaatgactgatactttgattactgtcatacctcttttttattctacaacttctttatttgcttttcttttagataaaattaaagtaactgttatagcaatgatgaatgatattgtcataccaacaaagtagtgtaaccatcctgcatgtactggattgattgaaataaatcctggcaatccagcagttcctaatgcgattgctttaaccttgaagaaagcaatatatgctgaaccaatacctgatccaacgatagcgccaataaatggatatcttagttttaagttaacaccaaacatagccggttctgtaataccaagtaatgctgaaatacctgcggcagatgccacaccttttaacttcttattttgtttaataataaagaacgctgcaattgctgcaccaccttgtgcaacattagacattgtcgcaatcgggaatataaatgatccacccgttttagtggcatctgcaattaatgtcgtttctacagctataaagctatgatgcatacctgtaataacaatcggagcatacaataatccgaatattaatccaccaattgcaccaccaaattcataaagccatgttaaaccatctgataaccagtaacctaattgtcgagtgattggacctacaaatgaaaatgttagaaatgctgttataaaaatagataacaatggtgttaacaaattatctaacaccgttggaataactttgcgtaaccctttttcaattgaggctaagatataagctgctacaagcataggtaacacttgtccttgataacctacttgattaatatgcaaaccaaaaacatcccaatatggaatagccttacctgcttcaactgcttttgggaaatcgtatgcgctcattagcgatggatgaactagtatcatacctaatgcagcacctaaaaatggattgccaccaaagcgttttgctgcactaaatccaattaaaattggtaataatgtaaatggtgcattcgcaaaaacatttatcatttcagctaatccagcaaattgactatatacatctatcaatgatttacctgaaaagaataaatctttcgcagtcaaaatgttatttaaccccattaataaaccaccagcaacgatggctggtataatcggaacaaagatatctgaaagcatttttacaaatcgctgtaacggattcatatttttagcagattgtgctttgacttccgaagtggttgatgcttcttttccagttaatttttccagttcactaaatactttattgactgtaccagacccaataataatttggtattgtcccccagtagaaaacgtccctttaactacatccatattgtttagcgcctcttcatttactaaactttcatcatttaaaactaatcgtagtctcgttgcacaatgtgccattgcatctaaattctcttctccgcctatcgcgttcaaaatttcttctgcggattgcttataattcatatatttagcctcctaattagaaccggttccatttattccactttattgtaaccggttccaaaaatatttgcaacactctattatcattttatataaacacctacaccatttttgatagcgcattcatttttattgctatactacatgcatgtatattaacattaattatcggaggtaattttatgaaagaacgtggctatatcgaacagctttggcgtgaggaaaaatatcatgtattgttacacagtcaacagtcttaccaaatgataaggaatgctttaaaaacggatttatcacttcatcaagttcaacaaatgattgatgatgctttgttaattgaaccgagtataggaagtgtatgtaatgcttttgatcatatgtggggatattttaaaaaatgtgcgaatgaagaagaaagacaacaatcaaaactacttaaagctgattttattaatggtaaaatcgacacccaaactttattagattttttagcagaacttgctaataaatatgatgttcaatatttactacaaagtcgtgttttaaacacaaaaagaaagagatagattgaaactttagttgtaacggacaaatagtagtcattggagttcagcaattcatactttgtactaaagtttactataatctatctctcaaggtttaaatgtacatatctatattaaaatgcgtttcatgatgttagaagataccatacacatttaattagttacagcataaatcaatttatacccttaattattacattgtttatattttaaattcgggggagtaattttaagtaatatcttgttgctgctaattctattgttaataaattgatattagatgtagaaattgagtgtgaaagttaataatagatgatttagctagtaacataattaattcatatatagtcaaaaagttctgttagatactgttcttgatgaatattctttgatgttaggtgttagctattctagatgagtttcttagatgtggatgcctgtcttgatgaagttatctatgatgttaatataatacttgatgttgattcttagatgttagtgcgatttcaagatgctgattctttgttgttgcactatcttggtgacgtttctagttgtttatagttatcgcatctcttgatgtaaaatctaagatgtttatgcatttctagatgttaattcttcgctgcttaagaattatcttgatggtaaatctagttgtgccatgcattttctcatgatgaatctaaggtgttaattcattgatgtgtgctgtttcttgttgcttcattatcttgatggtgaatttcgttgtctaatgcactttttcaaatgattattctaattgttacggcaataactagatggattttcttagatgttcacttttctagatgtttatacttatcttgatgttttctaaacagaacttttaaacgctttattttttagtagattgtttaaaatttcttagttgatggttattgttgttgatttgaataatttgtagcgaatattttgtaacagggctactaagaatttttataacaagaagtgatttcaatcgtactaattttcagcgtttgatgacaaaagtgtatgtccaaacttaaataatggcgataaaatttaagtcatgggtacatttaatgttttttgattcaaacttccattttggtcaatttgctttttttataacatagttgaatatcaataaaagattagcaagttagttcaaaatggctatgtattgttttttgaaatacataggtttgaaatctatattaattatgcaccaaataatttaattagactctatcgaaaatttccaaattttgcttactatctttctaattttacttttatattgtgcacaatgcataaaaacaagcgttttcctaggagttttcattaatttcttttatttttcactattaccttttcaaaaatattcaactataataggtatactatccatgattttaaaaatttccatgttttacatttaaatgatagatttcaatatatattaggcaggagagagaaatatgacatgccaacttaaaatacatcatacattatcgacaatacccagtcgtaatattaataatattatggtgctattttcacttacaagtaaactcaatattacgattaatggtgaaaccaaagacgtaagtaattatattatcttaattaaccatggtgatatttataatattaaccacggcgaaaatataatcgaattaatgatacccgttttttatttttatcaacaagatgatgatttctttaatggttatttagatcgtcatttattacaatcaagtaattatattaagtcattaattgccgatttaatcagtacaccaacaagatcttctttaatggggaaaaatataggtcaaagtattatagacactttacttaaagaagcttttataagaatagatcatgaatatttaccaaatattgctttaagcaatccggtgttcatagactgtgtaaactatattcatgacaatattgatgcgcacttgtctttaaaagatatagcgatgcattgcaacatctctgaatcatattgttctaatctttttgttcgatatttgagtatgaattttaaagattattttacaagtattaaacttgttaacgccatcaatttattactttctacaaaacattctattacaactgtttctgaattggccggttttaacagtcatacaaattttgcaaatcaatttaagaattacttgcattttagtcctaaacagttccgttcactcgtttccaagattactgaaccaccacaaatacacttccaacaagataacgtatcacaattcactgagttaatttcaacaattgatttaacagctcaactggctacaaatacaacagatattcatatagatgattttaatccgaaagatcgaagtcagcgtgccaaagtatttgttcgatttagtaatttcaatgaactatttcaatttattttcaatgaatattacgatattaactttgagcacttaccaaaacctgtcgttttcattgacgatattcacgatattgagattagccaaacgaattacaacctgttaaatagatgttttgaaaagcttttcgaaaaaaatataggtttagcaatcgctattaaatcaacacaacaattcgaaacgatgaagcaattaatactcacatttttacaaggcaatcaagactataagacaagcaagaaattagttaaatttatgctcgtattttgctctaattctatgacagcagaagaaattcatttatgtcatcttaaaattaaaaacaaaaataaagaaattaaatatagtgtgacagtcgatggctttttagaaacttattcaaccgtggaacaagtttatgatgtcatgcagcgtcttaaattccattattactttattgatattgaaaattcaaaaactgcaacacatcttatcactaaaaaccaacactatcatcaaactgacactcattttgaacagtataagaaatttattttagattcaggtatatcatcaacacaatttgtatataataacctgtctgtaagcggatttaaatatactaatgatggtaagaatccaattcaattatctgacatagtgtatcacttaattgcattattacgatatggcggtggcattagctatcaattattagatgaccattcaaattatatttccttgtacaacaaatatggtagtcccctaccattaatgcatttatataaaatgtttagaccttttgttaatgaagatattgaaattacaaataattatgtattgagtcgtaaagataataactaccatttcttattattcaataaaattaatgatcgatatatgtcagacgtaaaacaagatttcattttccataatgaattacctcaagactctttgatgattattaaaacattgaatcatgaacatggttcaattcaacatttgcttccaataagcgatcaacttgtttatatagaaaaagaaattttagatgaattagacaaaacgaattaccctaaaacggagcttgcagttcaagaagaaactggtcgtacatttgaactcaagttaaatcacgacgaggttaaatatatttgctttaaaccaagctaaatactaacagtcctcttgtgtttagtttcttacgttaaaggctatttatatcataaggagatgatatgtaatgagtaactcacaagcaattcaagcaattgaaaacgtgttagcaacgtcaaaagttggtgtattatcaactgcatataataataaacctaatagtagatatatggtcttttataatgatggtcttactttatatactaaaacgaatatccattctgctaaggtcaaagaaattaaagataatccagcagcatatgttttgttaggctacaatgatacgacaaatcgcagtttcgttgaaatggaagccacgatagaagtagttactgatcaaaaagtaatcgattggttatgggagactcaagataaaagctttttcagttcaaaagaagatccagaactttgtgttttaaaggtgacaccacaatctgttaaattgatgaatgacaaatcattagatacacctatcaaaatcgatttataacacaaagtatatataggaaataacttttatgaattctagatataacaatgttaaatacttaaaataactcgctataattaaagtgtttaatatgtttacaattcaatttgcaatgtattgttttttagacacactttattcacatttaacgtgattagggtgtgtctttttaaattaattttatgtaatataaatactgcatttgcaaactgttgcacttttaggtataacagaattaactacatttaaggagattgatgaaccatgaaaaagaaaaaaggttttggtcttggtattagtttaatcgccatcatgttaattgtatgtattgtattagtaatcatgatgatgactggcggaaagaaagatacatactatggaattatgaaagataatactactattgaaaaaatgattagtgaaaaagatgaaagcattgaaaaaaatgttaaattaccttcagattcagatgttaaagttaaaaaaggtgattttgtaattgtttataaattagcagattcagataaaattgttaaagttaaaaaagttgaccatgatgacgtccctcacggtttaatgatgaaaattcatgacatgggcaaaatgcacatgaaacactaattgtaatttaaattacaaattttagttgccatcaaggtatatacgagtaaaagcagcggtaagttgatttccaatttggaatcatcttactgctgctttttaagaattactgtgtcagtctattttcggttcgcctgcgcttttgcgcatgcataaaagcccctaacaacctgaggtcactgcgcttcggttcgcctgcgcttttgcgcatgcataaaagcccctaacaaccaaaggttgtaaggggctttaaatgtcagatagtattttttaaattgattttaaatattcttgaccttttgctttgtcatatacgttttcccatttagctataacgattgttgataatgcgttaccaataacgtttacacatgtacgtaccatatctaagatacggtcaacaccaataattaatgctaaaccttgtgccggtaagcccatggcacctaatgttgttaataaaacaacgattgaagttcctggtactgccgccatacctttagacgtaatcattaatgttaacatcaacacaatttgctctgataatgttaagtgcattccatacatctgtgcaacgaataatgctgcaatagattgataaagtgctgatccgtctaagttaaacgtataaccaattggtataacaaaagaagtaatttcttttggagaaccgaagttttccattttcttcatcattacaggaagtacagcttccgaacttgatgtagaaaatgctaaaagcaattcacttttcaagattctaataatattcatgatattaataccacacatccatgcaactagtcctagtatagcgaatacaaagaacaccattgcaaagacaacaactaatactaattttaatagtggtaataatgcggatgcaccaaatgtaataattgtagtacaaatgaatgcaaacactccaagtggtgctaattttaaaattttattaatcatccagaacacagcttcaagcgatccgcttaaaaattctttaactggttctgcttttttacctacagcagctaatcctaatccaaagaatactgcgaagaagataataggtaataattcacccttatttaaagcttcaaaaaagtttgtcggaataatatgtacaatggtatcaataaaatgatttccatatgtagattgttctgctgcatgtgcagttgattgatatttagaaatatcacctttaggtaattttgttgggtctaatccagcacctggtttaaataggttaccgaagataatccctaaacctattgcgattgttgtaataatttcaaagtataaaattgttttccagccataacgccctacagttttcgattccccaacgttcgaaatagaaagcgctagtgagcaaaatacaactggtataacgatcattttaattaaatttaaaaatacgtcaccaaatggtttaatgtaatttgctacgttttcttgtccatataataaaagtcctacgacaacacctaacactaatgcaataacaacttgcataggtaggctaatttttctcttgaatagagccatagtacaaactccccttcatctgacatcactcaattatatcagaaaattgataattatctataaaaaattaaaatatttatcttttatagatgtcaaaaatcactaatttccatacaaaaactgtttacctcaaataattaaaattgaaggcactaaactgtttcaccagttatacgttacactattttgatggtttataattttgattaaaatatttatgctttgcagttttcaaacttttcttagtctctgtatcaaagccttcaacaaataatcctttattagtactgattggttgcacaacataagttacaccaggttcatctttaaatgtaacttccttatagaagagaccttttttagcactatactctgttttttctgatttaattttatcttttagatttttctcttccaagtaactgtcaattagttgaatattcttatggccttgatatgttttcagaccaaagaaaaatgctactgcaacaattaatgaaataaataatataatgataactttaatcgcgttttttttcttcttcattatgtaactcctttttgcttatctattcagtatgaacgaatcaatttatttaataaagagtttttaccagattgtaacaaatttttttattctcaatattattatagaaatcgaattacatacacgatgcttttaaaaaatttaataacaaattttattttactatctatcaaaataattgactacttttaacaattaaggatgatacaattacatttttttcaatttaaaaaatcagtcatatcagtaattaccgatgaaaatactaagatatcgatatattttgcattatttaacatttaaattcaattatagacaattcaataattgcgatgaaatcagtacttgacaactattacacttcataatattgtttattttaacaaggagtgattggatgtatgtagaaaacagctatcttagcaaacagttgtgttttttattttatgtttcttcaaaagaaataattaaaaaatacacaaactatcttaaggaatatgatttaacctatactggttacattgttttaatggcgattgaaaatgatgaaaaacttaacatcaaaaaattaggtgaacgtgtattcttagattctggaacactgacaccattactaaagaaattagaaaagaaagattacgttgttcgaacacgtgaagagaaagatgaaagaaacctacaaatttctctaacagaacaaggtaaagcaataaaaagccctcttgctgaaatttctgttaaggtctttaatgaattcaacatttcagaacgagaagcatcagatataattaataatttgcggaattttgtttctaaaaattttgactattccgacaaaaaataactccctatcataaggtgatgggcagaagtatgcatcgctatgtttattcattatctttattgcttgtataaatctcgatgctcagttcttttgccctgattccttatcaggcacaaatctacccatttattacttttttatctccccttttactttaacttttttaatactactcatataatggctttgtaatacaaatttctataatggaagtgatgatattgaacttcaatcaattcgagaatcaaaacttttttaacggtaatccaagtgatacatttaaagatttaggtaaacaagtatttaattacttttcaacaccttcatttgtaacgaatatatatgaaacagacgaattatattacttagaagctgaactagcaggtgtaaataaagaagatattagtatcgatttcaataataatacgctcactattcaagctactagaagcgcaaaatacaaatctgaacaactcattttagatgagcgtaacttcgaatcattaatgcgtcaatttgattttgaagctgttgataagcaacatattactgctagttttgaaaatgggttattaaccattaccttgcctaaaatcaaaccaagcaatgaaactacttcatcaacatctattccaatttcatagttaaatttaaaatgaatacactactaaagccttaatgtcatgctacgaatattgcgcatgatattaaggctttgtatttaactaaatgaatgtcatgtattacatatcaaccgtttttcaatgagccatattctttttggtataaatgacgcatggtaaataatgcaatacatccaaataccgctaagaaaataaatgctaaatgacttgatcctgttaaattagctacgtacgtgattactagtggtgggaagaatcctcctaaaccacccatcattgatacgataccatttgcggatcccgcttcatttaagaagtaggatggtactaatttgaagattaagccgttaccaatacctgcacaaatacttattgttaaacagcctacagtgaataatgcgatatggtctgaaatacctaaaataatggcaccgataatcataacaacaaaatcaatcatcaatactttaactgcattaaatttatcacctaaaatgccacctattggtcttaagaatgttgccagcgcaatgaatacacctgatcgaataccagcatctactttgtcaattccaaaatgatttactaagtagttaggtaagaaaataccaaatgctacaaaagcaccaaaagtaatgaaataccaataacttaagtaatataatttgtagtttttagataatgttttcatttgtgccattaatggcactttaattttacgttcttgtgtatcaccaaatataaacataattaatgcaaataaagcgataataattaagtaacttctaacagttgtttgccaaccaataatacccgcaattggcggtgctaaaaatgaagaaactgctgtaccgatatttcccataccataaataccatttgctagacctactttttctttagggaaatatttaggaactgatgtaacaccaactgagaaaattgcaccacctacaccaaggaaaaatcctgacgccattaacatacccggtgtttgtgcttggcttaagaaaaatatcgggaataacaatacgataaaactagtaaagaatacccatttagcgccaacaatgtttgttagataaccaaatggcacacggagcaccgatcccaaaataactggtatcgctaaaatgattgatatttgaccttcagtaacattgacatcttgtttaataaagggcattaatggcgcaattatactccaagccataaacccaaccactaaacttaatgtctgtaatgtaagttgaaagccaccttttgttttgtacatacgtttcaccttcaccaaaatcatttattttttaatagatatcaatactctgcctatatattagaggtcaatgttatttaaaaatgctttcatttatatgaaatcattcaatatagacaaagtattgactacatatatattttattatgattgtgaaaaagtgaacataaggattttcccttatttatgaagtgatttaccctatacaatgtccctttaagatgcttttagacacttattcgccatcattttaatcatattatttaggaacactcacatacttttcttatttttttcaattagttacaattactgcttgaaaatcacgttacgttatcctttatgctgacaacataaggaggtttatcatgtataaaatcaatattattagatcagattccgtctataagaatatactcaaggcaccaataaacgaccgtgattcaattttcactaaagaaatattagtaccttttaaaaagaaatttgaggtacaacatatgcctatttataatgatgacaaacaaacaatgagtgcgattcaatttttagatgcatttcaaaagtctcccaaagaactggttgaaactgaccaaatgtcaatacaatacctgaataatgatttctggagtaattgcgaaaaatatttaaaagttgctatagatcaattttcaaattatagtatctcatttcaagtttctaactatcatttcacagtattacttggagatagccaaaaaccacttatgtatctaaataaaaatcgcggtggtgatggtggcataccaggttatattatgatttatttagtgccgagtacaagtacaattaattctatgaaaagcttaattgcacatgaagtaaatcataatatgcgctatcaatattattgattgggatggcggaagtttgattgaattgattattgcagaaggattagctgaaaactatgtagaatcattgtatggtaaagcgcatattggaccgtgggtaacaaatactaattggagtcgtgataacgtaaaaattaaaaatactatttataatcatttacatttaaagcatatatttgaatcgatgccttatctctatggtgatgatattaataaacttcaaggtaggcctatcgttggcttatctcatgctgccgggtatgcatgtggctatcacttggtaaaatactttttacaaaaaacaaacatacctattgaagttgccacaacacttccagcacaaaaaataataaatgaggtgactgaattttggcatacacatacactttaaaagatattattgaaattacaggtgtaactaaaagaactttacattattacgatgaaataggattattagttccagataaaaatgataaaaattatcgcgtttataaacagcaagacttagaaaaattacaaaagattttaatactcaagtcttttgattttgatatcgctaaaataaaacaatacatttcatatgataatgaacaattgcgaaagttattatcagagcaagtaagcaagttagataaaaagatttcagacttacaattaattagacgctctgtatgtgaatttattaacggacactctctaatagataccagcattttaaataagacactacagtcacaatatgataaagaagcatctataaaatatggtcatacgaaagcatatcaatcatttattagacgtaaagacagcttacaatcgcaggatatcagacataaattgacaactatcttcaataaatttaatcatatgtctttgagtcattatccaatccaagattgtagtgatctcgtatttgagtggaaggcatttatgaacactatcgctgattttgatgatgaaacattatgctgtattgctaaaacatatgaagatgatacgcgtttcaaagattactttaattcatatgataatcaaaatttagcatcatacatttcagaagctgttaattattttttgagcaatgtgaataagagcgacaatttttaatcctcatacagatgctacaacactgaatacaccaactaaaataattgttcaaagtagaaaactaatcatttattctctaaatcaataactatattaaaagttatacctttgcaaagcgaattagtaaaggttaccgaaaggagaaaggattaggttccattcgatttataaaaaaatatatttcgaaacatacaaaagcgccagaagataatcatttcctctcgcgcttttatactgaattatattaatttcaaactctaaaactctaataatttctttttcaatgcatattcaactagctcaggtttactctttaagccaagctttgtcataatatgcgtcttatgtgcttctactgttttcacagatacaaataatttctctgcaatttctttattcccgtaacctttggcaataagtggcaatatttctagttctcgttttgataagattttaaaaggatctgttgtgtttgcagtgtcctgatttgaattagatacaaattcattcactaaagatgttgtaagtttcatatctacatatgtttcacctttatatacagttcgaatagctaacaataattgttcatcaggtgcatttttcaatatgtaacctttcgcaccattacgcaacacatggaacaaatactcctcatcatcaaacatggttaatattaaaattttagtttctggaaaactgtcagcaattttactcgtagcgataagacctgactcacctggtggcatacttaaatccattagtaacacatcaggtttatattccattactttttggtaagcttcgacgccatctgcagccgttgcaacaacttccatatcattttgataatttaaaatcatagagaaccccgtacggacaacagcgtgatcatcggcaatgactattttcaattttattcccccaatgtatgtttcaaattggaatgttcaatgtaacattggtaccctcaccaattttcgtttcaatattgacgctaccgctgactaactcagctcgctcattcattccatataaaccgagtccagaacctttaggcttagaacttggatcaaaaccatttcccgcatctatcacttctgctaccaaatggcgcccagtttgacggatacctacatttatttcatttacatcagcgtatttcaacgcatttagaatagcttcttgtactactcgataaacaaccgtttcaatatcactatcaaagcgggtatttttaatatttgatgtatatatgatttttattccataattttcttcaaactgtttaaaatatgatttaaaagctgcttcaaggcctagatcatccaaagaagcgggtcttaattcaaccgacatattacgtatatcatcaattaatttagcgacaatatattcaatattttctgcgtcttccaaaagcttagttgtatcttcttgatattttaataatctcaattgaacatctacattgagcatttcttgaatcacactatcatgtaactctctagaaattcgctttctttcattttcttgggctgagattgttttacgcatcatacgttgttgatgtaatttctcttgctgttcaatttgtgatgaaacattttgaagcgtaaatgcatgaattcccctgtcttgatcaatcaactgatatgttgctgtaaatggcatcactttttgatctttcgtcttcataaatacttggaaattcgtagcttgtacttgcatcgattctaagaaacagtctttacatgattgtacatcataggcatttgtatacccttcacatctgtgacaaatcgcattcgccacagcactgtaattatcttcttcagataatatatctttagcagcatcattcattgcaataattttgccgttatcatcagcaaaaactatcttttcgattgaatgctcataatattttttcaataaagtatctaactgtatactgtcctcattaatcatgacttacaccctaattcatctcattatttatcatcattgaaaataccaaacttacgttgaatatcatcattatcaaatatttttggtaaaggacgaccatctctttgaccaaataatagtacgccatacacttgattcttataccaaagcggcactgctaaaactgctgttaatgattcgctcaataaaattggatagtcaatcttttcttcaggccctaaagctaaaccaacattggctattaccatacgctttcctgttttcataacagttccagctaatccacgaccttttcttaaaataatcaatttaaatcgattatttttattacctgaaacatagtgccattttattggagatgatggtttgttagattcatagaaagcgattgccgcaaaatcataaccctcttctttgcgtattttatctaatgtctcttgaaatctacgatcttcaattattgcttctggtgtcaaatcctttcacctcttatgcttacactttattcttacggtaaataatatatctgcgatttatatatgtcaaaggtacactccaaacatgcaccaaacgtgtaaatggccaacaagccataatagtgaaacctaacaatatatgcattttaaatgcaatcggcacaccactcatcaatgacgcatctggttttaacataaataattgtctaaaccaaattgataatgaagttctgtagttaaaatctggatgttgtatattggttactaatgttgcgtaacatcccataaatacgataagtaataataagaaatttacaaatatatccgacgctgaacttaatcttcgaatacttttcgtagtaacacgtctcgctgttaataaaaacatccctatcaaagttattataccaaagatgctaccaatataaacagcgcctatatgatataaatgctcagacacacccactgcatccatccatgatttcggtattaacaatccaactacgtgtccaaaaaacactggaataatacctaagtgaaataataaacttccccacatcaatctttttctttctattagttcactagatttagctgtccaagaaaatttatcataacgataacgtgcaatatgacctgcgacaaagacaactaaacataaatacggaaatataacccataaaaactgattaagcatgatgtttcactccttttggtgatgtcaaacataatttcaatgtttttctaagtgcttgaatcacataggcatatggattgttatcttcaccaagtgcattcgccatcacatatgttccatcctcaataatcataatgattaattgaatattctcttcagctcttggatcatttcgccattctgccacttgcaaaaattgaagcatcaacggtagataatcagaaagttcattatctaccatttctagtccaaacatttcatataatacctttaatttagctaacatttgcccacgttctttttgcgtatcaaatttgttatacgtcatatataatggtgcttttttcgtaaaatcaaatgtatctgtataaatcgctttgatttctgataatgaaaatgtcatcattacatttctaaatgctactaaatcttcatatgctggatgatctgtcgaaattgtttcttcaaaagtttttggatgaaaagttaatttttctggaaagcataactgttgtgccatatatccaaaactttcttgatattttttaaaattatcgaaattaatcacggaaaatccctccatagaaattctcattataaatttcttgaccagttttccctgaacctactgcaacgccacagccttcacagttatctccaaaatgctcgccgccgtaattgtatcctgtactaccttgtgcgtgatacgtatctaaataggtttctttgtgtgatgttggaataacaaatcgatcttcatatttggctagtcctaataaacgatacatgtctttagtttggcgctcggttatacctaatcgctctaatcgagacgtgtcaaatggctgttgagtaacttgagatctcatataacttctcatcattgccatacgttgtagggctccttttactggctctgtatctcctgcagtgaaaatattagctaagtattcaataggtaaacgcatttcttcaatggctgggaaaatcgcatctggattttgagttgtatttttaccttcaaaatagctcataattgggctaagtggtgggcaataccaaaccatcggcatcgttctaaattcaggatgtaacggaaatgcaagtttatattcaattgctaacttataaattggagagttttgtgcagcttcaatccaatcataaccaataccatctttttcagcttgagcaatgacttcttcgtcaaatgggtttaagaatatatctaattgtttttcgtataaatctttctcgtctactgctgaagccgcttcatgaactcgatctgcatcatataataaaacacctaagtaacgcatacgtcctgtacaagtttcagagcataccgtaggcatacccgcctcgattctcgggaaacagaaagtacatttttcagctttgttcgttttccaattgaagtaaactttcttatatggacaacctgtcatacagtaacgccatccacgacatgcgtcttggtcaactaatacaatgccatcttcatcacgtttatacatagcacctgaaggacacgatgcaacgcaacttggattcaagcaatgttcacataaacgtggtaaatacatcataaaagtttcgtcaaattggaatttaatatcttcttctattttttggatgttaggatcttttggacctgtaacatgaccacctgctaagtcatcttcccagttaggtccccattcaatttcaatgttatcccctgtaatttctgaatacgctctagcaactggcgaatgcttccctgatttcgcagttgttaaatgttcataattatagttccatggctcataataatctttaattaatggcatatctgggttataaaaaattttacctaaagcaatttttgaaattctacttccagattttaattcaagtttccctttacgatttagtacccaaccacctttgtagtgttcttggtcttcccaacgtttcggataccctacacctggcttcgtttctacgttgttgaaccacatgtactcagcacctggacgatttgtccaagtgtttttacatgtcacactacacgtatggcatcctatgcatttatctaaatttaataccatcgcaacttgcgctttaatcttcaagccaattaacctccttcatctttctaactgctacatataaatccctttggttcccaattggtccataataattaaagtgataactaatttgtgcgtatcctccgactagttgtgttggtttcaaatggattctagtcggcgcgttgtgtgaaccaccacgtgtatctgtaatttctgacccaggcgtttgaatatgtttatcttgtgcatgatacataaacattgtacctttaggcatacgatgcgaaataactgctcttgccgttacaacaccattacggttatacacttctagccaatcattatcttggatatcgtgtttttcagcatcttcatttgatatccaaaccgttggaccacctctaaatagtgtcaacatatgcttattatcttgatacattgagtgtatattccattttccatgaggcgttaaataacgcagtaccaaagcatctgtaccacctttaattttcttatctctattcccaaataccattggcggcaatgtcggtttatatactggtaagctctctccaaattgttggaaaacttcgtgatccacataataactttgacgtcctgttaatgttctaaaaggtactagacgttctatattcgttgtaaatggtgaatatcgtcgaccttgtttatttgaacctgggaatactgctgtcggtattacttctcgtggttgtgaagttatatttaaaaacgaaattttctcagcagcgcgttcgctagaaatatcttttaacggcattccagtttgttcttcgagatcttcatatgatttttgtgataatttaccattcgtagcagatgaaatacttagtattgcatcagctacattacgtgctgtatcaatacgtggacgattcgctctcacagaatcatcatttgtatcactccacgtacctaacatactttttaattcttcatattgttcactgacaccgaaacttacaccatgtgctccaactttccctttttcaagtacaggaccaagcgtgacatatttgtcgtaaattttagtgtagtcgcgttctacaattgcaaagttaggcattgtacgtccaggtaccgcttcaatttcacccttcgaccaatctttcactacgccgtatggtgttgaaatttcttgctttgtatcatgactaagcggagttgtcacaacatctttaaacgttccaggtaaatagtcttttgccatttctgaaaatgcttttgccaacgttttataaatatcccagtctgaacgcgattcccataatggatcaatagctggattaaaaggatgtacatatggatgcatatctgtagatgacaaatcatgcttctcataccaagtcgctgctggcaaaacaatgtcagaatataaaggtgttgctgtcattctgaaatctaaagaaacgactaaatctaatttccctgttgtttcctcacgccacgtaatttcttctggcttttcattttcatttggtgtagctaataaccctgattttgtgccaagtaaatgcttcataaagtattcttgaccttttgcagaacttgagattagatttgagcgccatataaacagtgatttcggatgattctttttcaaatccggatcttctatcgcaaattgcgtttgttttgacttaacttcatttatcgctcgttttaaaattgcttcatttgaatctataccttcatctttagcttcttctgcaaacaacaaactatttttattaaattgtggatatgatggtaaccaaccaagtctagctgctaaaacattataatcagctggatgttgatgctttaactcctctgttttagctaatggagattttaaacgatctacatttgactcttcatatttccattggtctgttgcaaaatagaaccaacttgttccgttttgcaaacgtggtggtccttgccagtctttcgcaaatgcgacagtactccatccttcaatcggacgacatttttcttgtcccacatagtgagcccaaccgccaccattcacaccttgacagccacataacataactaagtttaagattgaacgataaatcgtatctgagttaaaccaatggttaatacccgcacccatgataatcattgaacgcccttcagtatcgatagcgttttgcgcaaattctttcgctacttgaatgacaacactttgttttacgcctgaaatggcttcttgccaagcaggtgtatattttgattctgcatcgtcgtatccttttgattctaatttatgatcaaaacgacgcacgccatattgacttgccattaagtcaaaaattgtagcaatacggactttgtcaccatttgctaaagtgacttgtcgagttggaattggacgattgaatatcccatctccatcactatcaaagtatgggaattgaattgtttctaattcgtatccaccttctgccattgataatgtagggttaattttagaaccatcttctgtttctagttttaagttccacttcttaccttcttcccaacgttgacccattgtgccattaggtactactaaactatcgctgattgcatcatgaataactggcttccattcgccttgctctgttgtttgacctaagtcactcgctcttaaaaatcgacccgctttatatccattttcatcttcatccagcatgataagaaacggcatatctgtatattgtttagcgtaatttataaagcgttcattaggttgattaacataatgttcttgtaaaataacatgcgtcattccttgtgcaattgcagcatctgaaccaggattcggtgctagccagttatctgcaaatttcacattttctgcgtaatctggtgctactgaaatgacttttgtacctttatagcggacttcagtcataaaatgtgcatccggagtacgtgttaaaggtacattagacccccacataataatgtatgatgcgttataccagtcgcttgattcaggcacatctgtttgctctccccaaatttgtggagaggcaggtggtaaatctgcataccagtcataaaaactaagcatttcaccaccaagcaaattgatgaatcgagcacctgctgcataactaatcattgacatcgctggaataggtgtaaatcctgcgattcgatctggaccatatttttttattgtatacagtaattgtgctgcgattatctctgtaacgtctttccaatttgaacgcacgtgccctcccatacctcgggcttgcttatattgtttggctttgtcttcattttcaacaatagacgcccatgcagcaacgcgattaccattgttttcttctaatgcttcagtccataaatcccagagttttccacgaatatatggatatttgattcgaagcggactgtattcataccaagagaatgacgcacctcgtggacatcctctcggttcgtattcaggcatatccggaccacaacttggatagtcagtttgttgattttcccaggtaatcacaccatttttcacaaatactttccaagaacatgagcctgtacagttaacaccatgtgttgttcttacttctttatcgtggctccaacgttctctgtacattttttcccattctctacttttactttctaggatcgaccaattcccattaaatttttctgttggcttaaagaaattcaatccaaattttcccatatttatatcctcctacgtataaaaatacgatgtgtagatgtcgtgtttttaaatactttaaaatgcccaagactattgctttaattagattgtacattttttcacaaacataaaatattagggaatcacctaattacttaaggaatttccctatcaataacgggatttcattgaaataatacacaatcatgtatggtcgtgcttattgccaatctaaatcgttcaaatttggcacaacgacaaataaggcttcaacacgaatatattctctcggttgaaaccttacttattcatttatttttttaaattagtgacataacactgtattagcatctgcacgatcggttgaaatatatgttacattttcttgctgcttaataaatgcatcatagtaatcatattgcgacgaatgatatgtgccattcgatgtattatttgggtttagcaaacagccataaccttcgtcatataaatgttcacagagcataagggcgtcatgtttagaaccacttactacataaaattgctgagtcggattagaagttgttgagacattttcagtataaccaacaacttccccaataatacatatacctggtttcgcctcaattgaatagtgttgcaattttgaaataatattacttaaacgccccttaacaacaaactcgttaaaacacgatgcttgaaagacaatcgctatcgggtaatcaatatctgtgtattgttgtatctgtgtgataattttccctaaacgttttacccccatataaattgctaacgtgccaccattcactaaggaattgacatccacttcattttcttctgaatctttaaagtgacctgtagaaaatgtcacacttttagcaactgtacgcattgtcaaacctgtctgcatagtagcaactgctgcgctcgctgatgtcacccctggtacaatttcaaacgcaatatgatgttcatttagtgtgtcgacttcttcttgcacacgaccaaatatcgctggatcgccacctttaagtctaacaaccttgttatatcgacgcgctgcttccacgatacagtcatttattttttcttgctgaatatgttttgcatacggctttttaccaacatcgataatttcagtagtcaaattcgcatattgtaaaattaacggattcactaatcgatcatatagaatgacatccgcttcacgtattaaacgctcagcctttttagtcaaataattcggattacctgggcccgcacctatcaagtaaaccttgccatattcctctacagacatatatatacgttcccgtctgtaacttctacctcataaacatctacacaaccttcatcaggttcttgaacaatacctgtatttaaatcaattttttgatcgtggagcgggcaaaatacatattccccactcactgtcccttcagacaatggtccttgtttgtgtggacagatattgtgaatcgcatgaattttgccactttctgttaaaaacaatcctacctctttgtctttgacaataaccttttttccaattaggggtgttaattcatctatagttgtcactttaattttttcttttgtttccatgtattacaccttctccacttcaaaaattttacgtgcttgcgcattgctagttattgcttcccaaggttcagcttcgactgcttttttagcatccataatgcgttcaaatagttcattttgtctttctgggtcaagtaagacttcttttacattttcaaatccaagtcttcttaaccatggcgctgttctttcagcatatatacctgtttcgcgataatattgcatcaaagcaccacataatttgattacttcatcttctgtttctacagttgttaaaaattcagctttttcaacttctgtaccaccattaccaccgatatagatttggaatccattttcaactgagataataccaaaatctttaacacctgattcaacacaacttcttgggcagcctgatacacccattttgaatttatgaggtgtatcgatgtattcaaatgttttttctaaacgaatgccaagtcgtgtcgtgtattgcgtaccaaatcgacaaaactctttaccaacacaacttttaactgagcgagttttcttaccataagctgatgctgaacgcatacctaggtcttcccatatatttggtaattcttcttttttaactccatacaaaccaacacgttgcgaacctgtcactttaactagtggcacatgatatttcttagccacttctcctagacgaatcagttggtctgcatctgtaacacccccacgcatttgaggtataacagaaaatgtaccatcattttgaatattcgcatggtaacgttcgttagcaaatcttgattctctttcatcttcatgatcatgtggataaaccatattcaaataatagttaatcgcaggtcgacattttggacatccacctttgtttttaaagtttaaaacatgtcgaacttctttagatgtttttaaacctttcgctcttatttgcgttacaatttgatcgcgtgtcaaatcagtgcaaccacatataccagcaggttttgcggcaacaaagtcatctcctaaagtgtgctgcaatatttgagcaatttgcggtttacatttaccacatgaattccccgcttttgttttagccgttacttcttcaactgttgtaaagccattttccgtaatcgcatttactatagtacctttatcaacaccattacaaccacaaattgtttcatcatcagccatatcagcaattgatagcgatgcctcttctccacctttagtaagcaatgatacaagtgtgtaatcttcagtggattcaccttttttcatcatgttataaaagcgtgaaccatcatcgatatcaccatatagtactgcaccaactacattaccgtcttttaaaaagatttttttatagttattatcaacactattaaatatttcaatacctttaatttctgcattttctacaatttgaccagcactatacaagtcacacccagaaacttttaatgacgtaaatgttgttgatcccttgtatccgttcgtttctttatttgttaaatgatcagctaatactttaccttgttcatatagtggtgcaacgagtccataaactttgccgttatgttctgcacattcaccaactgcatatacattgctatcacttgtttgcatcacatcattgacaacaataccacgattaacatctagacctgattctttggctacttctgtgtatggtcgtatacctactgccataacaactaagtctgccggaatctcgcgtccatcagccaatttaacaccctcaacatcatcttctcctaagatttcagttgtgttggcttgcatttcaaacttcataccttgcttttctagatctgctttaagcatatttccagctttacggtctagctgcatttccatcaaccattcagctaaatgtaacaccgttacttccataccttgatctaataaaccacgtgcacactctaaacctagtaagcctccaccaattacaattgctttctttttagtcttcgcaatgttcatcatttgttcagtatcatcaatcgttctccaaccaattacactcggtaatgtcgaacctggaactggaatgacgaatgctttagaacctgtcgcaaaaatcaatttatcgtatgatacttcaataccatttgcagtagtaactgattgatttgctctatctacttcaattacaggatcatttgtaattaactcgataccatgttcctcataccactcatatggattcataattgtttcttcaactgtcattttattttgtaaaatatttgaaagcatgatgcggttatagtttggataaggttctttacctattaccgtaatatcatataaatcgttggcgcgctctaatatttcttcgattgttcgaatgcccgccataccgttaccaatcattactagtttttgctttgccataaaatatgcccctttactccataatatttatttcaaaaaaaggtattaatttttcgttagtgcttttatattttcatcggaatcattaagctttctaatctatcgttaatgatttgctttaaaattgggtcgaagttaattgaaggtgtgatgtgtatatctgtattaataaccatgtcattcatttgctgcttcactttgttaacaagccttccgtcgtataaaaataatggtacgacaatcaatttttgataccgtttcgagatgctttctaaatcatgtgtaaaactaatctctccatatagcgttctcgcatatgtcggcttgctaatttgcaaattttgagtgcatatttgtaactcttcgtgtgccttagtaaactttccattaatattgccgtgtgcaacaaccataactccaacttgttgttcttcacctgctaatgcgtcacaaatacgttgttcaattaatcgtctcattaaaggatgtgtgccaagtggctcgcttacttctacctttatgtctggataccgtcgtttcatttcatgaacgatattcggtatatccttgagataatgcattgcactaaagattagcaatggtacaattttaaaatggtcaaccccactttgaatcaacgtcgtcattaccgtctctaaatcctgatgctcactttctaaaaacgcaatatcatagtgatgtatatcatcttttactaattcagaaataaatgcttctaacgcttgattctgtcgtccgtgcctcatgccatgtgcaacaatgatattcccattcacatttaccaaccctttcacacgtattgtataccaaatcattttgtttttgtgaaaagaatcacattataatgtaaaatcagggaattccctgatgcctgtagtcatgcatattccttatacattttccctttttgttaaatcaaaaaagcgaccgatatatgaatccctactcaacatttatttgagcaagcattaatatatcggtcgcttgtagtgtatattattatcttaaaatggtggttggcctaatattgtttcgtcaaagcgctcgggtatcaatactttgcgcatgatcacacctaaatcgccatcatcattttcatgttcgctgtatatttcataacctcttttttcataaattttaagtaaccacggatgcaatcttgcagatgtacctaaagtaactgccgctgactttaacgtatctcgcaaaaatgcttcttcaacataagtaagtaattggctaccatagcctttcccttcatactcaggatttgtcgcaaaccaccagacaaaaggatagcccgaaatacttttcacacttccccaaggatatctaaccgtaatcgtagatataatttcatcatcaattgtcatgacaaatgtagtatttttatctatattttctttaacagcatctaaattagcattaactgaaggccaatcaatacctagttctcttagaggcgtaaatgcttcatgcatgagttgttgcaatttttctgcatcttgttcacttgcgagtcgaatcatcattttttgtcatattaatccccactcttttttaaatgatttaaccatattttatttttaaaataaatatccatcaaagtgtatcaataaatttatcacatgttagaaagtatgcttcatctgaatacaccaatactctcataaaacttattaaaaattactctctcaacgtaaaaaaaccattcaaattcatgaatggtttggaagaatgattcattgttacgctatttaatcactacatcttaattattgttgctctaaacgattacgcttaccatttaagaaagcataaacgagacctacaaaaataccgccaccgacaaagttacctaagaaagcaaaaacgatattttttaaaacgtgtaaccatgaaactgcatcaaggttaaagaataccatacctgcatatagacctgcattgaacacaacgtgctcatatcccatgtatacaaagaccacgacaccacaagctataaagaatgcctttgttaagccgcctttgaattgcatagagatgaaaataccaatattaataaagaagttacagaaaataccttttgtaaaaatattcaaccatgttgaatcaacagtctttttctgaactaaagctgttaaagcttgtgtcatttcaggtgtcatgacatgcgcaaatttcattaagaaaaataacacaaacccacctaaaatatttcctaagaaacaatataataaaatccaagtcatcttcttaacagaaacgactttataataccagcctactgtaaagtacatgaagttacttgttaataattcagagttagttaatacaactaaaatcaaacctaaactaaaagcaatggctcccattaaattgataagtccatctacgtgagtactcgcaaactgcgtctttattccgaacataaatacagtaacgattgagagtaaaaatccggccatcattgctttaagcatatatcggccaggtgtttgctgtaccattacttgcttcatttgtactgaagatgatattgaatcaacaattgcgcctgttgaatatgtatcttcaactgttttcttattttctatcacagtacttcccccatttactttgatcaaataaaatttactttctaattatattagtaaatcaatgtaattgatagtttaaatttcagaaaaatctttttattctctcaaaaatgtagttttctttcataaaaacagcgagataaatcgcgtgattggctaatatctttatgatttaagatattacgacgctcattttatctcgctttatgtaaagtattacttattcttttttaaatttgaaaagtaatgtaaaccatatgcaaatacactgtaaccaattgcagtacgtaaaataaaccttataactttattaggtacacattttgacgttactgaaatagaagatagtagtgttgtgaaaatatataatattaaaactttgatataacgttctaccatcgaatcatccctcatttttataatattacaagattattataaaccgaatgaaacaaaaaagtttttacatattttcaacaactttatttcaataatgcatcaagttgatctaaagtttgattcataccttgttcaacacccatgtttatgacttgttgagcggcttcttttgttggaaataccgatgttgatgtcactgtcgttttcgttgtattgctcttggaaaatgacaaagtaattttcatgcttggcatttttgtatcttttgcaccttgaggtgtcgcaaatgagtcaatatattcaattaaatatggacgcttaaccgttttatattctgctaatgtatagctggtcattgtaggtgttttaatcgcataaaatgcatcaccgcctgaaacagcattaaagcgaaacactttggtactagcgtcttttggatgaaaccatttttcaaataatgcttttgtcgtataggcatcaaacaccttttcaatcggtgcttctatcgttcttgaaaaaataattttattatcttcaactttaatcgtcatcttcccactccctatcttttatatttactcatcttaacatgcattgagtaacatatgttaccaaatcatttgttataaactatagtaatattaatcattccctctgttgaaattgataactacgaaataaaaaacacactctattcagctattaacagttgagtagagtgtgcaaacctgttgaattaatgcgctaacatttcttctttgatttggtctttatttaattttgaaggataatatgttggccagttatccatttcttttaataacgcgtcattatcattacccataaagatatggaagtgttctgcctttttaggtgcaatgttgtgatcgctaaattggatgaatttcggtaagtctttatcattaccatcgaccaatttaaacataaatctcacgccacggttacctttaggatatttcaatgttttcttaccattgtattcatatttaccagtgtgtttcttaccatctttagtaaatgtaatttcatttccttttatatcaatgttagtaatatcagttttatatcctttgtcataataagcttttaaatctttagcagatttcttcggatcattttcagctttatgttccatcacttcatcaagcgtaccgtcttttaagtaagggtaaacagattgccattcaccagcataatcgcttaattcacggtctttaacttgctcatctttaaaatacccatcagaaattgctttgtcatgtttactttcagctttgtcgtctttcactttaacaccactgtctaaagctttaccgatattttcaatattagatttcattaatgattgatacgtaatattatcttttttctgttgttctttatttaaagactccatgttgtagaattttaaaggcttcgcatctgtttctttacgaattgtttcagtcactttattcgcaacattatcttcgtaaagaatatatttagcattgctatctctaatttctttaacaattttagttaattctttttgtgatggatcttcagcattcatgttttgaatacctttttgaacaaaaccataacgatcagctaagtatccaattgattcatgtgaaatgaatactgcattaccttgcttatcttttgtaacttgcttcatatcgttatcaattttcttaagatcgtcgtttaattttttgtagtttttctcatagtcatctttatgttttggatcttttttcactaattcatctttaatttctttagcgaaagtttgattaattttaggatctaaccatacgtgtggatcatatccaccatgatgatgatgatgttcttctttctcatgatcatgtccctcatgttcatgctcttcaccatgctcgtgttgatcagttaaaagctttgctttatctaatttatcctctaaagacagttttttatctttatctttgatagtagatgcaactttcttagcaaccggatctaaattatcccctgtatacataaacaagtctgacttgcttgcacttaatatatctttttgtgttggttcatagctatgtaaatctgtccctgctggatagattgatgataccttcacgtgttttccaccaatttgctctgcaaatgattgcaatggataaactgtcgttttaattgttaccttgccatctttatcttttccatcatcattcccacatgcggctaatgataaagttacggctggtacaagaagtaacatacctaatttctttttcatagtcaccctcctaaatagtaatctttacgttttaaaattatatactcatgctacttaaaatacaagcactgtttttataaataatataaagtcgaatcatactttaggtatttaccacttttcgttttatctaatacatgactattgtacaaatatgatacagaaaactttatagtatttacgaacgtcataatataagaaaaaagacaatctctatcatattgctaatagaaattgccttttcatattgtcctaaaataacttaccctatttttatagtgtgacttttagatttaataatggtatttacatgatgctatttttatatgattgtcatctactgtataaaccaatctatgttcgtgattgatacgtctactataatacccagtcagattcgattttaacttttcaggcttacctataccttccaatgcaccatttctgtcaatacttttaagtaactcattaattttcttcaccatttttttatcgttctgctgaaaatacttataatcttcaaaggcttgaggcgaaaacgtaatatttaacctagccattatacatctatatctttcgttatagttttcccacgttctagatctgcaattgattgagctaagtgttcagcattatttgggttctgttggaggtaaagtgtttccatcatggagttataatctgattctgacatgattactacgtttttatcatcagtagatgttacagttaccatatcactatcatcatttacttttgtcataagtgcctttaaattctgtcgagcgtatgaataatttttaataatcatatttatcgcctccttttaacacacctcaattgtacaaatatctgtacaataaaacaagcgacacagaaaaaaactactaatcaagatttcgcacggggaagaatcaatacctatcctgtactgattccctactaaacaatgtttacatgataatttctacctatttagacttcatacattaaaaagacaatctctatcatatcgctaatagaaattgccttttcatattgtcctaataaattgatatcacttacttatctcaacaattaagactattttattttatcttttaataacttctcataactttcataatcatatggatcttcaactttctcgccattaataaatgcagttggtgtcgtttttatatgattatctttcgctatttttttatctttctctgcagctttccaagacttgctatcttttgtcttgtaatcttttataattttattttccgtctctttatctaaatgcagttgtttaatatgtttatctaatagttcttttgttaaccattctttattttcatcttgctgggcagcaaataattgcttttgaaaatctaaaaatgatttaggtgcatacatcaatactgcatgactcgcacgcgaaccaacaattgagtctttacctaagaaagctaaattgacaaattggtattccactttgtgattatctatataatttttacgcaactttggcatgactttttcatctaattctttacaataaggacatttatagtcgccatatatgacaactaatggtttgccgtttttcgaggatgtcgttgctgattcttttttaccgcaagctgttaaaattaacatgctcactataaataatgttagtaattttttagtcataataactcctgttcatatctagttcgtcatattttcttcatgataatccgcatcatgttgttgataatatcgtctcgaatcaaaatcttgcttatatgatacacgtttatcactaaaatcatatgcataataatgcacttcatcatcattactcaaaggtttataagctaaaatgataattttatccttatcatagacataaatattagcatctttgcgttcaaaatgatcaacacgatcaccgttgccttttttggcaagttgttcttgtttttgattttgaattttaactgcttcatctatttctttcacatatttatcattaccacatcctgatataaagactagtaataataataccgtcgccacaaatcgcttcaatgctcccactcctactatcaacttccaactaactttcaatataattaatactatacaccgtcaaacattaatgcgctacaactactaccaatgcatttaatataaatatccaaagaaataacagttatgtatagtcaaagaaaaatatatttcattttctatgtgtatttgtaatcagtttttgataaaataaaaaaatagcattattaataaattcaaaaattacagttcaattcagagagggatgggataaaatgaactttgtaacgttgacttcggatgagttcaatgcgtttacaacaaagcatttttcacattacacacaatcagctattcattacaatcatagagttgatttaaaaggcgatgtgcatcttgtaggggttaaagatgacaatggtcaagtgattgcaggatgcttattgacagaagcacgcacacttaaatttttcaaatatttttatacacatcgcgggccagtgatggattatacaaatcaatcattagtagcatttttctttaaagcattaacgtcatatttaaagaaacacaattgtttatatgtccttgtagatccatatttaattgaaaatttacgcaatgcagacggtgaaattgttaaatcttatgataaccgagcatttgttagaacaatggataaattaggttataaacaccaaggtttccctgtaggttatgattcaatgagccaaatccgttggctgtcagtgttagatttaaaagataagactgaagaccaacttttaaaagaaatggattatcaaacgagacgtaatattaaaaaaacatatgatattggtgtcaaaactaaaacgttaacgattgatgaaacgcaaacttttttcgacttattccatatggctgaggaaaagcatggtttcaaattccgtgagttaccatactttgaagaaatgcaaaagttatacgatgaccacgccatgttaaagttggcgtatattgatttaaacgagtatttaaaaacgttacaattaaagcaacaacaattaacagctgaactctcaggtgttgaagaagcattggaagaaagtcctaattcaaagaaaaataaaacgaaacgcacacagctagaacaacagctaaatagcaataagcgtaaaatcgacaatacaatagaacaaattgaacaagatggtgcagtcttaaacttagcttctgctttgtttatctacaatgagcatgaagtttattacttatctagtggttcaaaccctaaatataatgcttatatgggtgcctaccatttgcagtgggaaatgattaagtttgctaaagcgcatcatattgatcgctataatttttatggtattaccggtgacttttcagagtcatcagaagattatggagtccaacaattcaaaaaaggttttaacgcacatgtagaagagtatatcggcgactttattaagcctatcaaaccattactatataaggtacaaacatacttaaatcataaacgtcgttaaaatatcgctccaagattatgacaacataacaaagaaccacgcatcatgtatatggcatcatcaccatactaaaacatgatacgtggttttatttgattattcttcatttataacatttaagaaacgtcttaattcttctgttttcggacgattgaacatctcttctggagcctcttgttctccgatcatgccttcatgaataaatacaatgttattagatacttctttagcaaaacgcatttcatgtgtcacaatgaccattgtcatgccttcattagccaaatctttaataacctttaaaacatcattcacaagttcaggatcaagtgcagatgttggttcatcaaacaacatcactttagggttcattgctagtgctcttgcaatagcaacacgttgttgttgaccacctgataatgcatgtggacgttgatctttgacatgtgttaaaccaactttctcaagtaactcaagtgatttcccacgtgcctcatcctttttcaactttttaactgtgataagaccttccattacattttctaatgccgtcttatgcggaaaaaggttataactttgaaataccataccagactgtttacgaacttctatttgtgattttttatctttagatgtatatgttttgccgttaacataaactgtaccttcagttggaatttctaatgcattaatcatacgtaacaatgttgttttacctgaaccagatcgaccgattaaggttacaacctcaccttgttcaacagataaatcaatacctttgatgacttcaacatcattgaatgatttatggatattgttcaattgaatcatgagcgataccctctttcaatataagattcatagataccttggataattgaaataataaagcataccacccagtacattagcgcaactaacacataaattgttaaatattcatatgttgtagacgcaacttcttgagcttttctaaacatttcagccactaaaataaatcctaataatgatgtatctttgattaaacttaaaaatgtattacctagtgcaggaatcgacactcgaattgcctgcggtaaaatgatacgttgtatcgtttgaccatacgtcataccgatggaatatgcagcttctgtttgtcctttcggtatagaaataataccgccacgaataatttccgaagcatacgcacctacatttaatgataaaccaataatagcagccactacaggtgccaatgtccattggttgtcagcgtcatttgttaataatctacctaattctggaataccataaaatatgataaatagttgtactatcataggtgttcctcgaataatagatacatagacacgtgaaatacttcttaaaattttactcgttgaaattcgcattaatgctgtaaataatgcaataatcaatcctaaaacaaatgtaactaatgtaataggaattgaatatttgaccaaaccttctagcataggtccgaaagcttgttttgcagcatctagcgcatgttgttgttcgctatttagatttagaaacatcttgaccaaaccatttcttacctattttagctaattcaccgttttcctcgatttttttcaagccatcattgaatttttgaactgtttcatcatctgcttttttagaaaatgcaaatgcagatctactttgttcagcattacctttgattgctttgatcttagcattaggtttttgttttttataatccaagtatgacagactatcattaaatgtaccatcaacacgcttagacaataataaatccattgattggttaaagccatcaacttttgtaatatcagcacctttatccttagctaatttaccataattagatgtgaatgtttgtgctaacttcttacctttaacatcatcaaaatctttaatatctttttcattttcacgaataactaaaacagcacttgagaatgtgtaaggcttagaaaatttatatttcttttctctatcaggattaatacctacttggttcgcgattacatcaaaacgccctgcgtctaaacctgcaaacatagaatcccaagaagtttcattaaatttaagttttaaaccttcttctttagccactgctttaataacatcaatatcgtaaccagttaatttaccatctttatcgtggaaactaaatggtgcataagtcccctcagtcccaacattaattgtcttgctatctttactagcttccttgtctttcgacgaattgtttccgcatgcagccaatatgaaaacgaaagctatcatcacaaataaaagtcttttcatagaatatatctccttattcttattattctaatcggaataaaaatattttaatctgaaatgccggataagtcaatatgttgaacttttgctaaaaagctttatatagctagcaacttatatttattgacgagaatcaacttcttttttcttcccttgtaacataaatgaacaaaagaaactaataactgtaatcaataatgcaaataaaaatccagcgtgataaccatgcaacatcgtatcaactttaatttgattcatcatatcaattttgttcatgccattatagtctgacatagttggagaaaagtttttgcttgcatgagataaaatagtaattaatgcagctgttccgatagaaccagcaatttgttgtactgtgtttgtcatagatgaaccatgtgcattcatttctggctttaattgattcatcgtatgggtcattactggaattaatcctaacgcgataccaaccattcgaatcgcataaactgttgccaacatgattgttgatgtttgttcatccattacaacaaaataagccgtagtaataacaacaatcgccataccgactaaagccaattttctaggaccaaacttttcatataaagcacccgaagtcatcgacataaatgccataacaattgctcctggtaataaagttaacccagaatctaaagctgaacgatgcaataaattttgcacaaagataggtaaaatcgtttccgaaccaatcatcgataccattgtgacacccataataatgataccaactgtaaattgtttatttttaaatacagcaaaatttaataatggtgttgatagccgatattgacgtaatacaaataatgcgactaaaacaacgcctccaatcatagataataatacgataggattatcaaaacctttttctgaaattgaactcgttccatacaataacccgccgaaacctagtacagaaaaaatgacagaaataaaatcaataggtactttaattgtagttccaacattttttatcgttttaaatccaattaaaaatgtcacagctgcaattggagcgacaacatggaaaagcgatctccagttaaaatattcaacaaggtaacctgaaagagtaggtccaatagctggtgctaaaccaattaccaaaccaaatatccccatatatttaccgcgttcatgcggttggaaaacatccaaaatcgttgtcatcatcaatggcatcataatacctgcgcctaacgcctgaataattctagcaactaataatgttgcaaagtgcggactcaagccgccgagtaatgtacctaagaaaaagatagaaatacccactaaaaacacttgtcttgttgtataacgttgtataacaagcgcggacaaaggaataacaatcccattagtcaataaaaaagctgttgtcagccattgaacttgtgtatatgaaatttcaaaatctttcataatacttggtaaagccgtcactaatagtgtttcatttaataatccaaaaaatccacccatcagcatagtaataatcatcgttaatttttgtttcttcgacatttaaagcttccccctcaccatctaaaaaacgacacacatttttagatatccggtaattatacccattttccaaaaaattagcacgactttattacaatttctttaaaacgtaatcattactatttacatatgagtagttatcggtcataatatatttacaaggagggatagagatgaaattagatttacagactgctcgtcgaaatttaaatagccctaacattaaaacaagaaagcgtgctttaaagattattaagcaacacaaaagagcgaaataattgttttaatttgactatattgtatgtctaactatattttcgagtatccctagctcgttaatataaactctatacttaactatttccttacattacttcacatatttaagagctgcatatacactcactccttgtgtacatgcagctctttttttataagtagtatttatctataacttctaaatcatccgttaattcataaacaagcggtgcacctgttttaatttcataattaatgatatcttcatctgacacatcttcaagatatttaattaatgcgcgaattgaatttccgtgtgcagaaactaataccgtttgaccatctagcaaatattgtgaaatatgatctgtccaaaatggtatcactcgaactaaagtatctttcagactttcagaataaggcatcatacgtttatctaaatgattatatcgacgatcagctaagtaagcttcacgttgttcttcggtttcagcaggtggtttcacatcataagaacgacgccaaatatgtacttgttcttctccaaattcttttctagcatcatctttatttaagccttgcaatccaccatagtggcgttcatttaaacgccagcttttatatacaggaatccattgttgtttagattcagttaaaatataatgcgttgtatctaaagcacgtgttaataacgatgtaaaagctacatcgatggcaatgttattttctcttactttttcacctgctctagtcgcttcattaataccttgttcagataaattaacatcttcccatccagtaaataagtttttagcattccactcgctttgtccatgacgacataaaattaattttggcataacttataacctctttcctttaatctttaggacgttatttcagggatattttaagatgatttaatcttagtaattttcttttcaatatattttaaaattcaatgattaaatcaattatcactagacattaaatacataaatcctattccccattttcattttttaattcataaatgaatcaataaccacctaataacaaatcatattatacacctttgttcgctatttttctaaggtttaaaaaatatttttaggtaagcctaaaaatagatgtaataaaaacgcctcctcagatatttatatatctatgaagacgtttaaatacattatagatggtctggttctgggtgaacgtatactgaggaaataccttttttgtgcaaatgatgttcgacattgtcacaaatttgatgcgcttctactaaggaaaggttagcatctacaacaattgtgacatcaataaacacactacttccatggtaacgccctttaatacttttaacttcttgtacttcatcaacttctaaaatatcattgcgatacgcttctaattcagtttcattgaaaccatcactcaacataaaaattgcttctttaaaaataccaaaaccagtataaacgattagtaagcctagtaatgttgctaaaataatatcgacaattgggaaaccgatttgcgtaaaaattaatcctatcgctgttccaatgctgactaaactatctgataaattatctttggcagccgaatttaaagaactacttttcgttcttttcgctagtctttgattgactgcaaatacaatcaacattacaagaccactgattaagctgacgataattgttattgcgttaggtacaacgtcatcttctttgaacaaacgaggtgcattttgaataactacttggatacctacaaacataatgacaaatgacaccaataatgaagaaatattttcagacttcaaatggccataaggatgatttcgatctgcaggtttaattgaaattttcaatccaataataacagctaaagaaacgataatatctgtcatattgtttaatgcgtcggctcttacagctgcagagttaaagacaaaacccgtgacatacttaacaatagataagattatatatacaattaaactcaaataagcaccgcgttgcgccaatttaagattttcattatgagacatgcgttgaaccaccttgaattagtatagtaacaatattatgaatgatttattttaaatttacaacgtttttaatttttataaatttttataaaattaaactaatttattcattcgcaacccctaaaaataatttttagcctttctgcgaattttatgagctagaaaggcttatgcattagtagcgaagctaactaatgcgttcctttattttctgcgaattttatgagctagaaaggcttatgcagttgacgttttacgtccaactgcgttccttcgtcttcttcaaatttatttgttagaaaggtgcccaacccttcctgcttgttaactttcgtctcgaaaatttctatgttgggaccctatgcattagttgcgaagctatctaatgtcatgacctaattatatagaagaaaaagtgcatcagtgacaaattaaatgagatttctactctaccaaactctcttcgaaagacaattttctcctctatttattagcaaactattgcatttctccatatagtacttccttacttaaaatacgctgaatgttctgaattaaacgcttttttacatagttaacactagttaatctattagttaacattagttaataattagttaatttccatttgtattctcatgtgataaattctaaaagcatacaataaatttaatatgtaaaaagaaagggaatacacatgaaaaataaatatatctcgaagttgctagttggggcagcaacaattactttagctacaatgatttcaaatggggaagcaaaagcgagtgaaaacacgcaacaaacttcaactaagcaccaaacaactcaaaacaactacgtaacagatcaacaaaaagctttttatcaagtattacatctaaaaggtatcacagaagaacaacgtaaccaatacatcaaaacattacgcgaacacccagaacgtgcacaagaagtattctctgaatcacttaaagacagcaagaacccagaccgacgtgttgcacaacaaaacgctttttacaatgttcttaaaaatgataacttaactgaacaagaaaaaaataattacattgcacaaattaaagaaaaccctgatagaagccaacaagtttgggtagaatcagtacaatcttctaaagctaaagaacgtcaaaatattgaaaatgcggataaagcaattaaagatttccaagataacaaagcaccacacgataaatcagcagcatatgaagctaactcaaaattacctaaagatttacgtgataaaaataaccgctttgtagaaaaagtttcaattgaaaaagcaatcgttcgtcatgatgagcgtgtgaaatcagcaaatgatgcaatctcaaaattaaatgtaaaagattcaattgaaaacagacgtttagcacaacgtgaagttaacaaagcacctatggatgtaaaagagcatttacagaaacaattagacgcattagtagctcaaaaagatgctgaaaagaaagtggcgccaaaagttgaggctcctcaaattcaatcaccacaaattgaaaaacctaaagcagaatcaccaaaagttgaagtccctcaaatccaatcaccaaaagttgaggttcctcaatctaaattattaggttactaccaatcattaaaagattcatttaactatggttacaagtatttaacagatacttataaaagctataaagaaaaatatgatacagcaaagtactactataatacgtactataaatacaaaggtgcgattgacaaagctgtattaactttacttggcgatggttctaaatcttatatccaaccattgaaagttgatgataaaaatggctatttagctaaatcatatgcacaagtaagaaactatgtaactgagtcaatcaatactggtaaagtattatatactttctaccaaaacccaacattagtaaaaacagctattaaagctcaagaaactgcatcatcaatcaaaaatacaataactggattatttaactcattctggaaataatcaatcaaaaatatcttctctagttttacatcattttttaaataattttcgtaataaaccgtgattaaaaagaaccgctgattctcaatcgaatctacggttcttttttcattttccatcaattaaatgtttcttcgctatttgtcagcccacttttttacctgcaacttgttaaataatccttacatcgttaacgaatagttcatcatttagttgaatcagctcaactttattaacttcaaattttcacaaactattgcgcaatccattcctcttccactacaagcaccataattaaacaacaattcaatagaataagacttgcaaaacatagttatgtagctatataaacgcctgcgaccaataaatcttttaaacataacataatgcaaaaacatcatttaacaatgctaaaaatgtctcttcaatacatgttgatagtaattaacttttaacgaacagttaattcgaaaacgcttacaaatagattattatatatatgaacttaaaattaaatagaaagaaagtgatttctatgattaaaaataaaatattaacagcaactttagcagttggtttaatagcccctttagccaatccatttatagaaatttctaaagcagaaaataagatagaagatatcggccaaggtgcagaaatcatcaaaagaacacaagacattactagcaaacgattagctataactcaaaacattcaatttgattttgtaaaagataaaaaatataacaaagatgccctagttgttaagatgcaaggcttcatcagctctagaacaacatattcagacttaaaaaaatatccatatattaaaagaatgatatggccatttcaatataatatcagtttgaaaacgaaagactctaatgttgatttaatcaattatcttcctaaaaataaaattgattcagcagatgttagtcagaaattaggctataatatcggcggaaacttccaatcagcgccatcaatcggaggcagtggctcattcaactactctaaaacaattagttataatcaaaaaaactatgttactgaagtagaaagtcagaactctaaaggtgttaaatggggagttaaagcaaattcattcgttacaccgaatggtcaagtatctgcatatgatcaatacttatttgcacaagacccaactggtccagcagcaagagactatttcgtcccagataatcaattacctcctttaattcaaagtggctttaatccatcatttattacaacattgtcacacgaaagaggtaaaggtgataaaagcgagtttgaaatcacttacggcagaaacatggatgctacatatgcttacgtgacaagacatcgtttagccgttgatagaaaacatgatgcttttaaaaaccgaaacgttacagttaaatatgaagtgaactggaaaacacatgaagtaaaaattaaaagcatcacacctaagtaaacagttcaatcattttataaaatcctgggacacttcatacttgtctcaggattttttaacatattgaatcagcctcataacattaaattaatttatcgtatattaaatttaataataacaactgatttttataagaacaaagtatcacaccatagtagatacacaaataatacaaatgaatccatttaagttgaaagcttaaataaatattctcaagttaataaataattaacttttagatggattcatcaaaaatcgtaaaaagaacaatttgtattttacaaacattaattaaaaataaaagcaagacattcgtgcaatcggttaccttaaattgtttacaactgtcaacaataccaaggttttattaactatatttctcacaaaattagcttttagcattccaaacaaaaaaggttaaattgaacggaattatggcatttttaacttaattgtaaaaaaaagttgataatggtcaattgttaatgaacagttaattataataacatccaaaatatattattatttaattaagttaaataaaattatagaaagaaagtgaaacttatgcttaaaaataaaatattagccacaactttatctgtgagcttacttgcccctcttgccaatccgttattagaaaatgctaaagctgccaacgatactgaagagatcggtaaaggaagcgatatagaaattatcaaaaggacagaagataaaacaagtaataaatggggcgtgactcaaaatattcaatttgattttgtgaaggataaaaaatataacaaagatgctttgatattaaagatgcaaggattcattagctctagaacaacatattacaactataaaaaaactaatcatgttaaagctatgcgatggccattccaatataatattggtttaaaaacaaatgataaatatgtttctttaattaattatttacctaaaaataaaattgaatctacaaacgtgagtcagacattaggatacaatatcggtggtaatttccaatcagccccatcactcggtggtaatggatcatttaactattctaaatcgattagctatacacaacaaaattatgtaagtgaagtagaacaacaaaactcaaaaagtgttttatggggcgtcaaagcgaattcattcgccactgaatcaggtcaaaaatcagcatttgatagcgatttatttgtaggctacaaacctcatagtaaagatcctagagattatttcgttccagacagtgagttaccacctcttgtacaaagtggatttaacccttcatttatcgccacagtatctcatgaaaaaggttcaagcgatacaagcgaatttgaaattacttacggaagaaacatggatgtcactcatgccattaaaagatcaacgcattatggcaacagttatttagacggacatagagtccataatgcatttgtaaatagaaactatactgtgaaatacgaggtcaattggaagactcatgaaatcaaggtgaaaggacagaattgatatgaaaatgaataaattagtcaaatcatccgttgctacatctatggcattattattactttctggtactgctaatgctgaaggtaaaataacaccagtcagcgtaaaaaaagtcgatgacaaagttactttatacaaaacaacagccacagcagattctgataaatttaaaatttcacagattttaacatttaatttcatcaaagataaaagttatgataaagatactttagtacttaaagctactgggaatattaactcaggctttgtgaaacctaatcctaatgactatgacttttcaaaattatattggggagctaaatacaatgtatctataagctcacaatctaatgattcagtaaacgtcgttgattatgcaccaaaaaatcaaaatgaagagtttcaagttcaaaatactttaggctatacatttggtggtgacattagtatctctaatggtttatctggtggacttaatggaaatacagctttttctgaaacaattaattataaacaagaaagttacagaacaacattaagtcgcaacacaaattataaaaatgttggctggggagttgaagcacataaaattatgaataatggttggggaccttatggacgagatagcttccacccaacatatggtaatgaactcttcttagctggcagacaaagcagtgcatacgctggccaaaacttcatagcgcaacaccaaatgccattattatctagaagtaacttcaatccagaatttttaagcgtactatcacacagacaagatggcgctaaaaaatctaaaattacagtaacttatcaacgtgaaatggatttataccaaattcgttggaatggcttctactgggcaggcgcaaattataaaaactttaaaactagaacatttaaatcaacatatgaaattgattgggaaaatcacaaagtgaaattgttagatacaaaagaaactgaaaacaataaatagctagtaaaacacggtcgccaacagtaattgtgacgaccgtgttttgatttattatcttagtaagactgccattctttttctcaatgtgagatataaaggaatagctacaattaaagtgaatattacgcctggaatcgcgtttaacaacactacccacacaggtaaatttaaaataatagataatagtagcctagataccaaactgcctaatacacttgctaaaactaatgatagtacatttattttcaataaataaacaactgcaatagctataactctaaatataatagaaataatcacattaattggattaaatacgccaaatactagtaataataggctagataataatccacctaaaaagtactttttaattccaaagaaagctaatatcaataatgctgccggtgcagataattgaaaatctaatcctggtataatggacggtattttcaaagctgccaaaatggttaaaatcgcagcaatgacactaatttgagtaatatcttttgatgtcatactaaaacccctataccctttcataaacaacttgcttcggtgtgctttctaaaaatgatatgtaatgatttaaatcaatacgatcgtccacaaatattattctgcctccatatctcgtattaactggtttaatatcaaataatcgatggtaaccaattttagcagaggcaaaataacctgtcgtatacgttaagtcatctgacacacaaagttctcctttgacataaggatgcgcattgatacaactagcaattgctaaggcatcagtcactctttcattaagatcacctttattatttatatcttcaaacgaaaaatgtgttgccctaatccccctttgtccaaatgaatctaaacgtttaccagatatagcagatagaataatagctcctgtataaaccgtttcatttttaatatatgtcatcccttgatttagcgcttgttcagtgacaccacattcttgtgttaaatgttggagatttgctttatcatcctcaataatttgtaatgcttttatttgttgaatcggttccatgattttttgtatttttatattgagaaaatccggttgcccattttcatgaaaaaaacctttattataaaacctttgtaccgtctgttctattttgtcaaactcacaaatcgtttcagcaccactaatatgaacatcttgattgctagaacgcatttttatactatacatgacgatcacctcaatcttcttgatgcaaaatttcaaacaacctatctatatcttgttcagtatgaaaatacgacaatgatattcttaacattggcttagtcacagttggataccttaaataacttgtaaacacatgatgctttaataatgtttgatgaatgttctcagccgcttctatgtcatcaaactcaataaacttaatcggcgagtttgaactattataattaacattgagtgcttttaacttttggttaaaatatttactcaaactatttaatttagtgcgtctatcatcagcatttattaacttttcaatgtttctttttataaaatacaaattataaattggcaaactacttgagtagatgagtggtctaccgtgattaattaacatatccttcacatcatttgaacttaaaatcacacccccgtatgcaccacatgctttagataaactagaagtgagtatatctacaccttgataattcgagtaattctctattccaaaactatgtgaaacatcgagtatcagtgttgcgttatatttatgctttaatgagactaattgaccaatatccacaacgtcgccattcgttgaaaatgcactatcagatatgattatttttggtatattttgattagggtatttctctaaccttttttctaaatcagcaatatctaaatgcttatatatcactttttctaaaccacttaacttaataccgtcaataatactcgcatgattttcttgatctgaaaacacgacacaatttgtatttttgaaaatattaaataacgccaaattagcatcataaccactatttaagatagtacatgcactatatccgagccaacctgctaacattgtttcaatttcttcataagctgtcgaacttccactaattaatcttgaacttgataagtgataactatacttccgcataaatctttcgaaatcatccttatcaaacgctatttgacctaatcctaaataatcattagatgtatagttcgtacatctcttattttctacttcaatatactgtctatctatataccctaccgatttaagcgaccgatataaccctttctgttgtaataaatcaatttgctcttgaaacatcattcttgttttccttattttcacaagtgtcataatcaatttcaaagcccaaatcattaatcatatcgtagtctaattggttcggttgcccaccagtaattagataatcaccgacaaatattgaattcgccgcttttaatgctaatggctgtaacgaacgtaagttgacctctcttcctccagcaatacgaatttctttcgtaggattgattaatcggaataatgctacgattcttaaacatttcattggtgttaaatcatccatgcttccaaactttgtgcctttgattggatgcaaaaaattaatcggaatactgtcggcatccatttctttcaaagcaaatgccatatcaacaatatcttgattagattctcccataccacaaatcacgccagaacatggtgatatattattcgctttcattagttctatcgtatctgttctatctttataactatgcgttgtcacgacgttatcatggtaattttcacttgtattaatattgtggttatatctgtctacaccagctgacttaagtttcttagcttgttcgtcattcgttaatcctaaacatgcacagatttttagttgcgggtgttgagatttaatcgttcttacagtattactaatatgatcaacttctttatcgctcggtcctctaccactcataacaatacaatatgttccaatatgattatcatgtgccacctttgctccatcgataatttgttcctctggaattaaagcatatcgctgtttttgtttaatatctcgtgattgtccacagtacccacaattctcaggacatataccacttttagcatttaaaatcatgtttaattttacttttttaccgaaataatgttttcttaaaatgtacgcctcatttaataaatctaaggtatcaatattagtatcctcataaattttcaatacagtctcttttgttaattgttccccttgtaatatgcgtttagccaaattcatattaacacttcctatctaaaatgttatgtactgcctttttaaaaatacgtaccatcgttttcacttctttatttgacatacttaacactggcacaaacgtaatgacattttctaaatttctaatcattagcccgttttctttacatttacgtacaatacgttcaactttttcaatttctaacggcgttttactatctttatctgtaactaattcaactccaaacattaagcctcgtcctcttacatcaccaacatttcgatgacgcttcagcgcatgcaactgtttctcaagtgttgatgatgtcgtttcaatatgtgacaataacttacgtttttcataaagtcttatattttctaatgcaaccgtacaaacgatttgattcccggtgtatgtatgaccatggaaaaaggtattcacaccatgcgaatcacttaaaaatgcattgtatattttttgagatgtcaatgtagctgcaagtggtaagtagccacctgtaatcgccttacctaaacacataatatccggttgaacatcttcatgattgcatgcaaacatctttccagttctcccaaaaccaactgctacctcatcacaaattaataagacatcgtattttttgcacaatttctcgacttctttcaaaaagcctttaggatgaacaaacaagcctgtcgcaccttgaatcaacggttccaatataaaccctgcgatttcatcatttctttcaattagaatttgctctatattcgttaaaatagctgtcatcatttcattttcagtatcgtaattactgcgatagaaagatgggctttctacttgaatattctcaaatattaagtctttaaatattttatgaaaggtcttgataccaccaacacttaccgcaccaatcgtatccccatgataaccgtgatttagcgttataaacttgtttttcttggcatatttttctctatcaatatttttccaatactgatatgccatctttattgcgatttcaacagacgcactgcctgtatcagaataaaatacttttcttagattacttggcgtgatttcgattaatttttccgcaagttctattgacggaatatttgatgatcctagcagcgtagaatgggcaattttattgagttgctttttaattaccttattcaagtatttgttattatgaccatgcacattgacccacaacgatgcataaccatctaaatatttattgccattcgtatcgtaaaggtaactaccctttcctttttcaatgatgattgtttcttctttgctatatacacccatttgtgtaaatggatgccaaacatattctgagtctttttgtttaagttgttgtgtgtaattcatttttaactcctattaattgttttaaaaatgcttctgagaaattttcatacgtggcatgttcttcaaatgtatagactgttttatttgttaattttccaatcgtaatttgattgtctttttcaatatagctgtctgtatagcgattcattattaaaaaattactcgccgatacattctgattaacataatcttggtgaacaatggcatcgctaatagcacctaattttgatggcaacacactgatgacacaatctgcacaatcattgattagatctttagtcatgtagaaatcatctgtaccttcatatattggtacggcaattcccccagcaccctcaattaagataaaatcaaattccttatctaaaacttttaccttatctaatacacgctgcttatttagaaaaatttgatctgtcattttaaatgcaaggtgtggtgatacaggttgcttaaaagtataaagtgacgttatgtcatagcttaaatcacattcatttttaaatacttctaaatctggaaacgtcccgtcttggcgttcctcagtttgaaatggtttaaaaatacaaactcgatgaccacgtgttttcaaagcatggtataaatgctttgtaacataggttttgcctacatcagtattcgtacttgtaataaaaatcctcataaaaaataagcacctcaatccgaatgtaaacttttataattaataagtttacatttaaggcgcatgtttttcaagaaaacatgaatttaaacttctcagtataactataaattttggcaaaattttgaccttgctattgaaatgactaagacttcttaaggaattcgggcagatataaacagcgattcgataaaatatgtcagttaaaattaataattgcattatttcttaacaaaaagacatcctagctttaccatcttgtgaaacaatccattaattgtaatattacgttgagcgccttgttcatcaatgctataattagttacataataaattgaacatctaaatacaccaaatcccctcactattgccctagtgaggggatttattttgctgttgattatctatcaccctttttatttccaaattctgattccatattaaactattatttataatttccagcctgctgatttactttttattcttataaagtcttgatacattcctggttttcgaattaattcatcatgactacctttttgaattatttcaccttcattgagcactataatctgatctgcatttttaatagtttcaagtttatgtgcaattgtaattactgttttgcctttacttaattcattaattgccgtttgaatcagctgttcattttcagggtcaatacttgcagttgcttcatctaaaataattattggtgcatcttttaatatcgccctagcaatagaaatcctttgcttttctccgccagataaattactacctttttcatttagcattgtttgatatccctcaggtaatgacatgatgaagtcgtggcaacatgcttgcttcgctgcacgaataatttcttctttcgttgcacctggattgccaaacaatatgttattttcaatcgtatcattaaataaatacaccttttgaaatactgcactaattttcgacattaacgtacttaatgtcatatctttaatatcaacaccatcgatgcgaatatttccatcatcgatatcataaaagcgcaagagtaagtgacataatgtagatttcccacttcctgaaggtccaattattgctgttgatgtttgtgtaggtatctcaaaattcacattctttatcacttgtttatcatcatatgaaaagttcacgttttgaaaagcgatattttcatttttaatcgtcaaattttttccattctcatccagttctggagcattttttatcttttcaatatcatctatcgtcatatctatcatttcaagtacgtgtgcagcactattaatattttcaacactatcaaatatcacaaatgaaaaaattgaaatcataataagggtaggtaaatcaatactatgattcatatataataagcatgcaactaatacaatcattattgaaacaacttttaaactaagtaaatgcaataaattgaatgggatatattgcatttctatttttgtatttatacgtttactttcattgactgcttggttaaaacttttaagactcgtattttctttcgcgaatgattttattacttgaataccacgaataacctccaataccttttccactaattggttttgtacattatgatacgctggcgcattttgtcgactctttctttctaataattgaatcgcaaaaaatgatagtaatacgccaatgcatgctaataatgatacttgccacgaaactacaagtagagacaatatgagtactgtaattaatatgtatccattaacaacaacgtccaccattttcatagcaaagttttctaaaaaggttaaatctgttgttactattgttgttaactcatttgaatgatgcgaattaaaataacctaaccttacatttttcaatttatcccctatatctaaacgttctttcgcactcatttcataagcgatgctctcatggcttttgcttttgaaatatgctgtaataaatcgtccaatcactaataaaaccatgataattacaacattcaatatatctttcatataaataggtttatgagatagcacattattaaatatttttgcagctaaaaagataggtagcgcaataaaaatagcatttaaaaatgacatgctaaatcctaaaatcattcttgctttatatggtcttatccagtttaaaattttaaatgtaatttgaaacatatttgacctccttttctcattagtttaattatgtccagtattgattccccaatcttttgtatgcatgtgcgtatcccacattttcttataattaccgtttaattttagcaataagtgatgtgaccctttttctaaaatttgttgtttacctaaaacaataatttgatctgcatgttgaatcgtagataaccgatgtgcaataacaatcaatgttttatcctgcgtcaacacatttaatgcttcttgaattttttgttcgttgtctggatcaacgtaagcagtcgcttcatctaatacaatgataggcgcatcttttaatatcattcttgcaatagtgactcgttgtttttcaccaccagacaatttatctcccactgtaccaacattcgtatcatatccatctggcaacttttcaataaattcatgacattgtgctaacttggcagctttttcaactgcctcatccgtagcttctggattgccaagtttaatattttctttaaaagtaagatttaataaaaagttatcttgtccaacaaaaccaactaaatcgttaagttgtttcgattcaatatcttttatatttataccgccaatcgtaatttcacctgaagtcacatcccagtatcgtgatataagcttggcaatggttgacttaccgctaccagatgccccgacgatagctgtgaaattattttctggtactgtaaatgataaatgcttaaagaccagatcgtccttatctttgttatatgaaaatccaacattattaaaagcaatttcataatgttgaggcttcttaaattttgttgacaatactaactcttctagacttaatatttgattcacttcagttaatgcgtattgtatagactttaaatgatttacataattagtaaaattcttaatcggtgctactacacctaaagataatacgatgcataggaaaaattccgcatagtttaattggttgatagatatcaaatacatgccgaccggtaaaatccctaaaaatgttgaaggtaatacactagctcctaaattcatatacccccatgtatttttaaaccaattcaaagtgtgaatcttataattatctactgcatctttatattttttatatgaactttgagattgattaaatgttttaatcacttcaatgccttcgataaactctacaatcgcgctattcatataattattcgatttcatttgttcagcatatgtctcattaaatccagacataacttttttaaaagcgaaaattgaaattggtatcgttactaataaggcactagccatacgccaatcaatgagcattatgtataaaaagatagcagctgacaaaagtaagtttcctataacttcaggaatcatatgtgctaaaggtaattctattgtttcaaccttatcgacaaatatattttttaattcacctattttcttagattccactacgcctaaagggagacgcattaatttttgagctaattttttacgaatttcagataaaatttcatatgccgtaatatgtgatagcatcgttgacgctccaaaacaacacacttgtgaaatataagcgattaaagcaataaagatataaaccataatcgaattaatcgtatatgcattgttaatcatcattaaaataattttaaagactgcccaatatggaactaatccagaaaagacactgatgatagacaacaaaattgataacataattttccatttactatcagaagcaaatccgctgagtatctttatccaatttgtctgattgttcatcgtatatgtaactcctttcaattaataatctaaattaagccgcttatattatttatttcactggatgatatacataatataaatttgttatttgttaaaaattaatacttattacaagtacatcatatattagttgataacgattatcaatgtcgcgtggatttgtgacacatttcttttaaaaattcacaaggttatggggcagaaatgataaagagccactaatgatttattatgtagtggttctgggagtgggacagaaatgatattttcacaaaatttatttcgtcgtcccaccccaacttgcattgtctctagaaattgggaatccaatttctcttagttgggactccgccaacttgcattgtctgtagaaactgtggatccaatttctctatgttgggtccctgagtatagccttgtagagtctagtacattgatttgtatcccaatgtccctataattgattattcgctttatctaatgatcctatgactcaactattaaatcatttttcgaaatacttaattctaatataattaaattcatttattgtaatattacaaaaatacattgcacaccttgttcatcaatgctataattaattacataataaattgaacatctaaatacaccaaatcccctcactactgccatagtgaggggatttatttaggtgttggttatttgtcaccttttttattgttgcgcgttcgtaaccaatgtgcaaaaaacgcaacaagacagccgcttaaagctgaagtcatgatgtcaattaataaattgaacatccgtcatacacctcctctctgcgttaaagtaacgcccgagatgttaggcgaccattatattatatcatttatttattatatttcacgcaatattaaagttcgagtaaagcgttttttagtggtttacgctactttaattactatcttttaaaatccatttagataatacaaatgtgatgggtatcgtaatcactaaacctgcaaatggcgcaatttccgctggcaaatttagccaggatacaaaaacatataataaaactgtttgtaagcttacgttgacaatctgcgtaattggaaaactaatgaattttctccaagtaggttttaccctgtaaacaaaataacaattcaaataatacgaaatcacaaaagcgactagaaatccggtaatatgactaatcatatattcaatgtgtaataattttaacagcaataaatagacaacataataatttaacgtattaatgccgccaacaatgataaattttaaaatttcagcatgcgtttgtgttagtttcatatgtgtaactcctcaacatcaaaatatatgcataactacgttctcgaaattgcgtgccaatccgcttcacttcaaatatgtttatttcaatctttataccctttcacagcaaatttagtctctttcctctcatccttatacgccattataatgtaactgatttatcgcgtgactcattagcactatagagattactttagttcactagtaattttatatacaataagagcgacaacagtaatgagaggatgtctactatgcaattacaaaaaattgtcatcgctcctgactcatttaaggaaagtatgaccgcacagcaagttggcaatattataaaacaggcatttactaatgtttatgggaatacccttcattatgatatcattccgatggctgatggtggtgaaggtaccacagatgctttaatgcatgcaacaggtgccactaagtatacagtcatcgttaatgaccctttaatgcgacctattgaagcatgttatgcacgcgcagacgaacaacaaattgcaattattgaaatggcggcagcgtcaggtttggatttattagaaaaagaggaacgtaatcctttatacacatcatcatatggtaccggtgaactaattaaagatgcattaaatcatggtgctaagaccattattttagggattggtggcagtgcaacaaatgatggtggtacaggtatgctaagtgcactgggcgttcagtttactgatgtaaacggggacttattacaaatgaatggtgctaatcttgctcacattgcacaaatcgatataaccaatctagattcgcgattaaaagaggtgacctttaaagtggcctgtgatgtttcaaatcctttattgggtgaaaatggtgctacctatatttatggtcctcaaaaaggcgctgatgcaaagatgataccaaagttggatttcgcaatgtcgcattatcatgataagataaaaatgtgcacaggaaagtccgttaatcaaataccaggttctggtgcagctggcggtatgggcgcagcattattagcgttttgtgagacaactttaacaaaaggtattgatgtcgtctttgacattacagattttcatcaaagaattaaagatgcagacctcgttattactggagaaggacgcatggattatcagaccatctttggtaaaacacccgtaggcgttgcgttagctgcaaaacaatatcatattcctgtcatcgcgatttgtggcagtctaggcgaaaattatcaacatgtttacgatttcggtattgatagtgcctattctataatctcttcacctagcactttagaagatgtcctacaaaatagcgaacaaaatttattaaacactgcaactgacattgctcgtattctgaaattgcaataatgtcaaagtaaatcatcagctttattatttgcagttaaaacttgaatgaggtgaaacccatgaaaagaactgataaataccgtgattcatatcaatacgacaatcaaaatcaaaatcatcgtcgtcaatctgaagacgcatcgtatagacaacaatatgctaaaggcgatcctgaagaacacccggaacgatactataacggtagagattatcgaagagaacaaattcttgaagaagaaaacgagaaatcccgccgttcaaaaaaatggttatatatcattattgctattctcttaattattgtcgctatttttgtcacacgcgccttacttaacaatgatagcgataaagttagtaatgaccctaaagtctctcaaaattataaaaaacaagttgaaaatcaagacggccaaattaaccagcaagtcgataatgctaaagaaaatattaaaaacaaccaaaaaactgatgacattattaaaaatttacaaaatcaaatcgacaacttgaagcagcaagaacaaaacaaagctgattctaagctaactcaattttatcaagaccaaatcaacaaattgacagaggcaaataatgcacttaaaaacaatgcaagccaaggtaaaattgaaagcatgttaaatgatattaatacaaaattcgacagtattaaatctaaattagaaagcttatttaaagatgaaaatggtggcgctaattaattattacacctgctttgatgataaacattaattccctatactttatctgtatcactacgttattcgtgatgatgcattaagagtatagggattttttatataaacttgtattctaactacatacaaatacacacaaaacgtatataatttatataattatatcatttaaaggagtctgatcatgcaatcaacgaaaaccaaaacgaagcatttttcatttttattgctaattacgttaggcgtcatgaccgcttttggcccactaactatagatatgtacgtaccatcattacctaaagtgcaaggtgattttggttctactacatcagaaattcaattaacattatcattcacaatgattggtcttgcactaggccaatttatctttggacctttatccgatgcttttggtcgcaaacggattgctgtatccattttgatcattttcattttggtatcaggtttgtctatgtttgttgatcaattgccattattcttaactttacgatttattcaaggtttaactggtggtggcgtcatcgtgattgccaaagcctctgctggtgataaatttagtggcaacgcactcgctaaatttttagcatctttaatggtagttaatggcatcatcactattcttgcaccattagctggtggattagctttatccgtagcaacatggcgttctattttcacaattttaactattgtggcactcatcattttaattggcgtcgcttctcaattacctaaaacatctaaagatgaattaaagcaggtgaattttagtagcgtcattaaagattttggaagtcttttgaaaaaaccagcatttattattccaatgctattacaaggtttaacttatgtaatgctatttagttattcatctgcatcgccatttattactcaaaaattgtataatatgacaccccaacaatttagtatcatgtttgctgttaacggtgtaggtttaatcattgtcagtcaagtcgttgctttattagtagaaaaattacatcgccacatattattaatcattttaactattatacaagtggtaggtgttgctttaattatcctgacacttacattccatttaccactttgggtcttactcatcgcattcttcttaaatgtgtgtcctgtgacgtcaattggaccacttggtttcacaatggctatggaagaacgaacaggtggcagtggtaacgcatcaagtttacttggcttattccaatttatcttaggtggcgctgttgcaccattagttggcttaaaaggcgaatttaatacatcaccatatatgattattatcttcattacagccattctattagtcagtctacaaatcatttactttaaaatgattaaaaagcaacatgtcgcataacacttcaacataattagaaccctagcaaagatatctatctttgtcagggttcttctttatgaattatgagatcgaatcttcaactaaaattacaccttcatatcaagaacatttctattcaatcaccctttaacaggcatccaaatttctgtaatatatttttcacttgtagtatcaccatcctgatacaactcaaaaaatggtgctgattttaccgtatctgcttgatattgatgtatgtagtgatgaacctcttccattttttgttgaactgctttaggtactgcgccctgtgcttcaaataccatatactttgaacttgctaatgttatgacatcatatttttcaatatcagcactattatctccggtaactgcaatcatatatgacatcttaccgtctaattcagatatacataagccaagtatcccggctaaatcaccattattttttaactgtaaatccgcaattactccctcttgataacatctttgccaaaaccctgctatatgttgctgagcctgtcgtccattttcatacgtttctttaatacctactaacgttaacgacgcaagttgttgtaattgatattccattttatcactccattaattttattcactcatgtaaaacatatgtttaggacattttgcattgacgctatataattatattaaatatttattgaatcaatgcgaggactatattatgaaccgaaaaatattaccagttaaacctatcagtcagctatttcctatccctatggtcatggggtgtgaaggtgtttccgcagccatgatgttgcaatacaataaccaacatatccctgctacagaaattatgagacattggccgacacatccgaacaatccacataaaggttatgttggacatcacttattcattaagcttggcaattatcatcaaacgatatttccagaagcatatgtaccatttttacaaaaatacaatcctaatatcgtagacggcactggtaaatccttagaagatcttaaaggtattatcgatcaaggtcaacctgtgttaatataccatactaatcttggctctaaaccattactacgtgttttccgctttgataacaagccagcgaaacaagtttcaaatattcacgtaacgttactcattgggtacgatgattactattactattatatcgatccactttggagtcatattcgtcgtggcctagttttacctgccatcattccaaatcgcaaacaaattattaaaattcgtaaagagaaaatggaatacagctttaattcaccaggaagaaagtgcatttatgtgcaaccacattcatatacaattgaaaatcaacaacaaaataaacacacgtaagtaaacacattactcgcgtgtgtaaaacataaaatgcgcaaactgggtcaggtttgcgcattttaaatttctattatttgtatcgtctcatttatttcctggtaaatatcttctgaacgccattgtcttggatagcctagacacggacagagataacatctgccatcatctatcacacttttacgaaaatgaacatggcccataatactatatggtatatcgaacatcgcatacaaaggattgaaatcacttgtcccaataaatgcattataaaaatcgaatatacgatgcggcataggaacaatgaaatcagggtgcgtcacaacatgtgtgactaaaatcactcgtctatttcctacttctaatatatctttcttcacttgttcagccgctattttagataaattttgatctgatatgccccaagatattcgttctttatcttgccaagtcgcaccataatgtttccctttttgtaaatgttctaatgaaaatcgttgtgctgcaaagctataatcataccaacctgtatgtcctattattgcccattcttcatttactataaatggttttcctaccaagcactgtgacatgctcttataattattccaaatgtcttgcgtagtcatactttcaacttcccataaatcatggtttccaggaacaaatttcacaggtatatctaattgttttgtcaattgcgttataaattggtgcgtcaattgataatgatttgagatatctcccgcaatcaacaatatatccaatttcttatacttaactatttcaaccaatgcctctaagtaatcttcggatgtttttttattatgacgatcaatatgtaaatcggcgattgtccctatcttcatacccataccttctttactcaaattaaaatgttatttattatgccatagcttatctaatatatatagttaactgcttcatttagatgattattttatatttttgcataaaaacttatatcttttcaaaaaatcgataagttttagttatcatacccttacctatcaaatgttttttcttatatttaaaaaaataattgctttattaaatggatttctttagtatttataattaagaaaacgcttacacacaacttttttatttgctttatcctgaggaggaaaattatggcaagaaaattgcatagagagttgaataacagacacatccaattgatagcaattgggggcgcaattggaactgggttattcctaggatcaggtcaaacaatatctttaactggtccatcactgttattcacatacatgattattggggttgtactattcgcttttatgcgcgcattaggcgaattgttgttgagcaatacaagatttaattcatttgttgatattgcaaatgaatatttaggcccttttggtggctttgtcattggctggacttactggttatgttggattgtatcaagtatgtcagacctaactgcgatgggacaatactttgcattttggtatccacaagtcccaaattggattaccgtgctatttattgttttaatcttgattagcttcaacttattaggtgccagattatttggtgaactggagttttggttctctattattaaagttgtcacaattattgcgatggttatcgttggtcttgtattaatctttttctcatttaaaacacattatggacatgcatcattcacaaacttaatcagtcacggtggcatgttccctggaggaacatttggtttcttaatgtcattccaaattgctgtatattcattcattggtattgaacttataggtgtaactgctggtgaaacgaaagatcctgaaaaaaccttaccgaaagcaattaataatgtacctatccgtattttattattctatatcggtggtctattagtaattatgtcagtcataccttggaatgatatcgatccaaatagtagccctttcgttaaactctttacattaatcggtgtgccatttgcagcaggtgtcgttaactttgtcgtgctaactgccgcggcctctgctacaaatagtggtatctattcgaatagtcgtatcttattcggactgtcacaacaagggttaggtcctaaagttttaaataaaacgaatagtcatggcgtgccttatttatcaatgttagtttcatcaattgcattacttatagcagccttgttaaactacattttccctaatgcaattcaactattcatatacgttacaacgttatcaactgtgttgtttttagttgtttgggcaatgattattgtcgcttatctaatgtatttgaaaaagcatcctgaggcacataaaaacagtaaatttaagttgattggtggcaagcctattgcttacattattctagcgttcttcttctttgtattcattttattattctttagtgacgaaacaagagcagctatttatatttcgccgttctggtttatatttttatttttcttttataaaaaatacaaaacgaatgctgaaaaactcgcatatgaacaacgacaaaatgacagcggtcatttcagatatgacaatcaataatttaaacatctcgctctagtatcagttcaaccgatactagagtttttttgaaaataacttcattttatcaatatatctatgtcattatgccttaaaagtgataaaatattaactattaaaattttgaggagtattgtatggcactattagaagcatttttaatttttatttttgctgtgattattagttcggttatcaataatcgattcccgcaaattcctactgcctttattcaaattgcattaggtgtcgttattttcattattccaatacaagttgatttccaattcaattctgaagtatttatgtttgccgttatcgcgccactactttttgtggaaggtacccacgtctctcgaacaaaattattagaatatcgtaaacctatactattaatgtcaatggcactagtgtttgcaactgtagtcggtgttggctattttatacattggatttggcctgccttaccaatgccagccgcttttgcaatagcagcaattttatgtcctacagatgcagtagcagtatctgctattacacgcggaaaattattacctaaaggttctatgacgattttagaaggtgaatctttactcaatgatgcagcaggtatcatttcatttaaaattgctgttactgcattagtaactggtaccttttcattattccaagctgttgaacaatttatcatttcaacaatactaggtgtacttattggtgcaattattggattcgttgtcgttagaatacgtatagacttaaccgctaataaaggtttaaaagataacaataccttaacttttattcaattattaactccttttgtcgtatactttttagcagaagaagttcatgcttcaggtatcattgcagttgtaatcgcaggtctaatccatggtttagaacgcgaccgtttaattagagcacaaacggaactacaaatgaattaccatcaaatttggaacacatttagttatgccttaaatggttttgtatttgttgtattaggttttatgattcctactgtagtcatagatattttccaaacagagcctgacaacttttcatttttaatagtgatcactatattaatcgctattgcaatttatgcatgtcgatttgtttgggtttatttctggtacaaagatttttatttcccgaaaaatatacaatcttatctagacgaggaacatgattcacatgaaacaccaccttctcgtgtgcgttacgcatttattatgaccatgtgtggtattcacggtacaatttcactttcaatggcacttacattaccatttatcattacaaaaggacaagcattcgaataccgtaatgatttattgtttattgcatctttcatggtattaattagtttaatcttagcgcaaattgttttacctttaattacaccatctgccgaagatactacttttaaaggtatgacttatcaatctgccaaaattttcattgttcaaaaagtgatccagcattttaaaaacgaaagtaaaaaagacaaaaacgatacaaattatcgcccagtattaaaccaatactatggagaattgttatttttattaaattcagaacctgataatcaaaatacaaaagaactcaaacgtttagaagatattgcaaaagtaatcgaaacatctacacttgagcgtttaattgataaaggtaaggcaacatatcaggatattaataattaccgcaatattgtcgaattaacagagacacaccgtactgcatcatttgttgaaaaatttgcaaacttcttcaagatgttatggcttagacttaaagcgatgaagcactacaaagccttaaataaagaatctaagaagcaagaatttgaaaattcattcaaagatgttcaaaaaattatgcgtattgtgaatcacaatattattttacgcttaaaagaagaacaaaatagtacaaatgtacttgaggttagcttagtcattaatcattactatgatatgagtcgctcattaaagtggcgtgcacaacgtcgaaaagaacgtcaagaaaacagcaatcaaatcataccgcaagctatgttccataaccacaaattggaagcattgtacttacaacgtcatcttttagatgaattaattcgcaaaaataaaatcaacaatatcgttgcagctcaaattcgagaaaatatcaattacaacgaaattgtcttgtctttacagtccaaacattaagcaagacataacaatacccccgtacatatgagacaaagtcattatcatctcatatgtacggggtttttatattcaacatcaaaaaatcggattgatgaaaagtaaataacctttcatcaatccgatttgattatagaatctattttttaagtttaaatggaattgtacatacgttaacattcttttgataaattaaatacaatttcatacgcaaactagtttgattgtgtaataaattatgccaacgtttcttagtaataaattctggtatcactactgtaatcatatagttttgatcgtttgctttacgattaatcttatcgataaaacgtgaaattggtcgtataatactgcgatattccgaatgtaaaataactaatcttacatctgggaaatgacgtttccatttctcttggaatgctttttcatcttcatctccaaatgatacatgtactgctatgacatcattattcgcaagcatttgtgcgtaataaatagacttatcaactgctgttgtaatacttgttatcggcacaattgctaaattacgatctaccacgtccacattaagaacatcaatgtcagaacgtaattgttctgcgatatctcgataatgtttgttaattttcaagaagaaaatcaccacgaacggcaagaaaataagtatcggccatacttggctaaatttagttatgagtaaaatcataaaaacaataaatgtcacgataccacctagtaagttcacagacaacttacttaaccaattcttaggacgttcatgaatccatttaataaccataccgaattgtgctagtgtaaatggaatgaatacaccaaccgcatacaatggaattaaatcttcagtcataccatcaaatacaataattaaaataatggctaatacacctaaaataataatcgagttagagtagcctaagcgatcacctctaacagtaaacattctaggcatatatttatctttagacattgaagccgctaacatcggaaaagctgtaaatccagtgttggctgctaataccaaaatcatcacggtcgttgcctgtacaaaatagaaggcagcattatcaccaaatatttgcatagctaattgtgataaaactgtcgtttccgtttgtggcataattccataaacatatgctaaaccaacgataccaactaataaaaacgctaaaattgaacccatagcaattaacgtttttacagcattattagcacttggttctctaaaattggttaccgcatttgaaatagcttcaacacctgttaatgatgaagcccctgatgaaaatgcttttaatagcaagaataatgttactccaggaaccgcagttcctactgatgcatgcatatgtggttgaatatctcctgtcgccacacggaaagtacctataaatattaatatcactaaccctataatgaaaagatatactggataggataatacggtggcagattcagttaaaccacgtaaatttaatattaaaataaaaagtacaagtaaacatgcaatcagtactttatgcccatataaacttgggaatgcagcaacaaatgcatcagcaccagatgatatactaacagcgacagtcagtatgtaatcgactaataatgagcctcctgcaagcaatccccatttttctcctaaattggtcttggacaccatatacgcgccgccacctttaggatatgcataaataatttgcctataagacataattaaagcagctaataagatcagaacagcacctgcaatcggtaaagtataccaagttgcaactgcacccactactgataatgtaatcagtatttgttcgggaccgtaagccactgaagataatgcatccgacgaaagaatcgctaaccctttaaacttcgatatcttttcgtcttttagttctctgttttttttaggttgccctataataagtcttttaaattgattgaacataatctcctattcctttttatagtttttgatggatatcactatacgcctatctttccaaaaagtatagagagttaattaatattttttatgtaattatacacctattaacatataaggtgtcaaaaataatggtaaatatacctctttaattaatttattcaatagaactggtataataaaataaatctcattaggcacttaagtaaatttaacatataaaaaggaacgtttatgactactaaaaaactgtattttctatccatttctattatcattttagtcgccatttcaattgctatacatataacattaaatagcaatacgaagacacggttaaccaatgattcgcaacaacaaatagatacaattatcgagcatgatttacaaaagggacacattcctggagcatcaattttaatagtaaaaaatggcaaagtttttttaaataaaggttatggttatcaagatgttgataaaaaagtcaaagcttctcccacaacaaagtatgaaattgcttctaatacgaaagctttcacaggtcttgcaattttaaaattagctcaagaaggtcgattaaacttaaatgatgccgtatccaaacatgtgcctcattttaaaatgaactataatggtcaaaatgaaactattacgattaagcaacttttggctcaaacaagtggtatacctagtgatattacaagcgaagacgccgtaacaaataaaaataatcgtttaaatgatgtaacccgtgcaattatgggtgatgaattacatcataagcccggagaagaatttgaatactcaaatatgaactatgatttattaggtttaattatccaaaatgtcacaaagcaatcatatacgcaatatataacagaccattggcttaaaccacttcaaatgaaacacacgacatttaaacaaacaaattacaaatcaaaacatgatgctattggctacgaattacaaggttcgacacctgtcgtctctaaacctgaatttaacctttgggatacaccatcagcatatatgatgacatcaactgaagatttggaacattggataaaattccaacttaatccacctgataaatacaaatcattagttcaacaatcacataaaaatttatcatcaacaattggtgaacctaatgccaatgcatatgcttcgggctggtttaccaataatgatgaacatttagtgtttcattcaggaacgctcgataacttttcatcatttattttactaaatccaaaacaaaattatggaattgttgtgcttgcaaatctaaattcggaatatgtacccaaattagttgagcatcttaatacacaaattgtaaatcacaagcgatattcgacggttgcgtctatactcaatcaatataaagaccaatttaatattgttaccgttttgatgacaacacttattttattagcatttatattctcagcttatcgtgcttggcaaatgcgccatggtcaaattcttttgcgtagatcaaaacggattgctgtattgagttggctaactttatgtttatgtatcgctatagcgctcatattatatgcattaccatatctcattctcggtagcaataattggtcttttgtactgacttggctaccaatagaaattaaattagcactaatcacaacattaattgcattattcagtacattaattgtaattctgttattccttcatacaaagataacgaagacataataaaaaagacttgttcgagccgtgcgtttgataatatatcatccacgattcgaccaagtctttattctttgtatattaaacggataaattattatttaattggattcatgccgtctttccaagttttataaatcagagtaccaccttgcgctttaaacttctcattgcttacgccacgttcaaatggttgcgcaggttgaatatcaatatttggttcaacaccaagttgttctttataccattctgcaaattcagaacctttaacaggtgcatcatctgctacattatagataccattttcaaaatgaatagcttgaatagatgtttcaactgcatcatcaagatgcacaaatgatgttacgccatctgaaagtgtcacttgaccatccataaattgattataaatcatgccatcttttccgtaccaagtacctgggccatataaccaaccaaaacgtaaaacaacgtattcatccatacgagccgtttcttcttctagaccaaccacaccatcaaccgttacttttctatcaccagttgagttaaaatcaagtgaagtttcctcatttgctaatccttcgccaggttcatacataaaggcaatactttgggcaattactttcttaacgtcatgctttttcgccgcatcaattaagtttttagaaccttcaatacgtactttcgtatttgctgccatatcaacattttttaaatccgtaatttggttgataatgatttctggtttaaaatctgctaacgcttgatcaatagtatcagcttttaatatatcaccaatatatgcttttacattaacagcagctagcttttgttgaccattctcagatgtagtaaaaccagcaacctcatgcccctcttcttttagtctttgaactaatttaatgccaataaggcccgttgcaccagttacaaaaattttactcattataaacaccttttctctatttgtctttttaatataattacttgcttgatgagtttacaaaattcacgtgagacttccaaatgatttgcctcaaaatttttcaaagtgtcgtcgtaaaaactgtctagtaaatactaatagtatgtcgtagacctatgacaaatctgaattatgacgaaaatcaatcaagaaaaacagcaccaagatcatttcaatttgaaagtaccttactgctgttctttatttattacatttcaatcttaataatgaccgtaatatcacgtgattgtcatttccttgtaatcatacctaaaacaccaattaatcctgtgcgtgtcgctgactttctttagtatgaattaaatcagtaataaagcgattgactggcgcttcaatatgacgttgtttacccaatgttgcaactgcgtcattaatataatcaatttcagtttttctattattaacaattaaatcttgatacatggatggataatgcgcaccaactttttcatttaaatcaactaaatattcaaatacttcatcaacatttaaatgaacattatcaatcgtcgctacatgcactatttcttgcgttaatttataaatcaaacacttcgcataactactttcattcagcgatgccatattacactccaacactgtgcttaatgcatttgccgtaccattaacacaaatctttttccaaatcgattggtataaatctttactaatgacaccattcaattccgcttcgttaagtaaatcagcaacttttataacattttctttaccttcatccactagttcacctatttcaactggtccactaccaagtaaatgactgtgtccagggctttcaagacctgccgtccaagtcgtaacacctctgacaatttgtgattgagcaacatactgcgcaatgacttcttcatgcttcagaccattcatcgtacatacgacgatcgtttcattatcaatatgtggcttcatatcttccatcacttcttttaattgcatagactttggaaatagaaagacaacatcgtaaatgctttcgtccggttgatcattaaaatgatacatcggaatgtttaactcgaatgcctctccattaatcgttatatttaatccatgttgcttaaccgcttcaacatgagatgtatatccgtcaataagtgtgacatcatatcctgcttgaaatagtttggcaccaaagccactacctaatgcacccgatccagcaattgcaattttcatcctataaacccctcttcatcgttgttgttcattttaaaaatactactttcgcatattagcgtcaatttgaaaatcattcgcttaatatgcacacagcttttatcgtctataaaagaacacacctaacattaaacgtcaatacgtaacattaagtgtgtatgataaacttactttcacaaaatttcctttaaaatccgtacataataacttgctttcatttcagttttacaaattcgtttgatttttaggaactaatagtaaaatgactaaaaatgcaacaattgctagcaaggtattaaacatcatacctgtgaaaccacctaagttcaaatttaaattagctgctaacacagtataaaccgtaccagatactgctactccaaatgcatttcctaatgatgacgccattttatacacacctgaagcaacacccgacttatcatctggcgcactagcaactgctgtatcagttgatggtgtagcatataatcctaaaccagtaccaaacaataaatatccaactatactagatacgatataccacatttctggtaaaaatgttaacgacaataagattaacccaatcactgtaaagccacttcctagtaatagtgggcgcttcggaccatgttgagataaaatcttttcacctacacgaatcattgacaacactgctattaaatacgttaatgaaatataacccgtttgcgaagaattaaatcctaattgttgttgataatacgtgttaatgacgataagtgcaccacctgctacaccatttaataagaagtttgaaatagttgcaccactgtatcctctatttttaaaaattgaaaaatcaacaagtggatgctttattttattttcgtaatatacaaaaccaactaatgaacagataaacacaacaattaaacctagaattaacggtgaaactaaaccaaaatgagacgtctgtgtgatgattacatttaaacttaacatcgtcactactaaaatgactaaaccaataacgtcaaactttttagcttctgctttcatacctttgattggttctgctttagtctcaggtgcatgtttgattaagtacattgctaataatgttaatagaattgaaacaacaaatattgaacgccaacctatatatgtagccattaagccaccaaacaacgtacaaataccactaccaccccaagaaccaatagaccaatagcttaaggcacgttgtcttcttgtaccaatataatattcgttaataatagcaagtgttgatggcataatacatgctgcagacaaaccttgaattattctacctataattaaaaatgctggcaaaggtgtaatgatgatgagtaatgaacctacaacatttaatatcaatcctacataagtaattttgacgcgaccaaatttatcagcaacatcaccagcacctacgataaacaaaccagcaaataaggcagataagctaacagcgatatttatcgttccaacgtcactactatatgttgattgtaatgggacaacaagattaacaagtgactgcgcgaatagccaaaaggtaataacccctaaaacgatacccaaaagcaatcggttgtcacctctaaattgttttgatgtgtccatgaattagataagcctcctatgtttaagaaaaacaaatttttaatatgatatattaagaaacaatatcataaatttgcagaaaattataaataaaacatctcattttttagcatttttacaataattaacgctttttatccaaaaactttcatgataataattgccattttagtgtaaacgcatacaaacacaacctataaaaaggctactcaaagattatttgagctccttgagtagcctcattttttataaatcatgaaacgaaatcgctaaattataaacatcttctactattacatattaatactttgcggccgatgattagattgatttttacgatgtcgtgttgttgggtctaatcgtttttctaaaaatcttaatagtacatcaatgacgattgcaatgatagcaatcggaatcgcacctgctaaaataaacgttgtgccatccgtcgcatttgtaccacgaatcacaatgtcaccaagcgtaggtgctcctataaatgatccaacggcaacaacacctatcgcaacaaccaaggcaatacgaatgccaccgataataaccgaaacagataacggtaattcaatcattcgtagcacttgattgcgtgtcattcccatacctttgccagcatccttaatattcgcatcaacactagctataccagtataagtgttttttataattggaagtaacgcatataaaaacactgttaaaactactgtttctgaacctaagcccatgactaacattaaaatagctaacattgcaatgactggaactgtttgaattatatttgcaattgtaattacaaatccagaaagttttgtgtatcttgcaagcaagattcccaatggaataccaattaaagctgcaaacagcacaccatagacagacattaataagtgtttgaaaaataaatcccatagatagccaaagttcgtaacataataattgaataattgctgtaataaattaccttccattacttatgaccacctttctgtttatcaaaatagtggtgttttttcaaaaattcttctgcgacgacagcaggttctttacctttaccatccgcttcataattcaagcgctgcatctctgaagttgaaatctttcctgtcaacttattaatcgtcgttttaagttctgggtgttggcgtaataattcatttgttgcaacagcactcgcagcataaggtgggaaaaattgtttatcatctttaagtactttcaaatcatacgcggcaattcgaccatctgtagaataacctaatgcaacgtctaacttctctgagtttaatgcgtcgtagactagacctatttgcattggtctcactgtaccaaagtcgaaaccatactcttttttaaatccttcatagccatcgcctttacgattcatccatgaactatccatacctaaacgtaaatctttactatgctttgctaaatctgaaactgtctctaaatgatattttttagcagtttccttcgttaccatgaatgcatacgtattcgcaaaaccatacgaatcaaaaaacgtttgatcaaatttctttttaaatccttgttgtgtggctatcattgctttcttaggatctttaattggtgcttccttcaaagctcccgttaaatctgtgccattatatctaacacctgatatattagcatccccattaattaaggcattatgttgaatcgtacttgaccctaaattatttactaatgttggctttatcttaccatgtgtatcatgctctattaacaaccgtaacatatgtgaaataatttgcgattcgcttgttgataatgctgtaattttgacatcatttttcgtgctcttactacctagtccgggcaaactacatccagataatacggtaagcgataagacaaacacgacaagtatatatttaattttcttcattatcttagcctcctaattatccagatacttttaagcctttgggaactacccatttttcaactaaagctaataaggcatcaacacctaatgctagtgcagtaacgagtaccgttgcagttacaatcatcagtggatcatataaatttaaaccattgaaaatgaaatcacctaatccacccgcacctacataacttgcaagtgtagcccaactaattacatacacagacgacaaacgaatgccaccaatgataagcggtaatgctaacggcaattcaacatccttcatcaattgaaattgtgtcattcccatactttttccagcttctttaatgttgctatcaatattttgaacaccgagtaccgtgttatttaaaataggtaataatacataaataaatagcgctacaattgcaggcgttttaccaacaccaaaaatcggtatcataatagcaagtacagctagtgttggaatagtttgtaagacacctgccacagttaatataatattggcagttcgctttgtttttgataataaaatgcctataggtactgcaacaatgatggcaagtaataatgccactatagaaatataaaaatgttccagtgttttcgacatcaactgtccaccatgttcatgtaggaactcaatcatgatttatcatctcctatgtcacgtactttgacattagtagtgtgttgctcatgcacttttgaggacgcagtgtcttcccccacatgttctgcttgcactgtatcctcactatcgccccaaatcgtgtcatatacaatatcaacaacattggcacgcgtaatcagtcctactaaacgctgttgatcatctacaacaggaacatttctgatatttctttttaaaatcgtgcgtacagaatcttgcaatttcgaatcaatttgaacggtataaatatgttgttgcatcatatcacgcaaagttttgtgtcctcgtataccttgattaatatcctcaatgtctaagaatccaagtaaatggttgtcactatcaacgacaaaaatagtatcaacacgtttttgtctcataatatgaacggcgtcattcagtgttgcttctgcctgtatcgtgattggtttaatcattacaccttctacagtcttgtcattgggacggtcttgaatcagtctattttgtcctataaaatcacgtacaaaatcatttgcgggatgtcttaaaatattgtctggtgtatcaaattgcaccaccttaccttctgacataatacaaattttgtctgctaatttaatcgcttcatccatatcatgtgttacaaagataaacgtcttgcctaattttcgttgtaacgttttaactaaatcttgtaacgtatctctcgtaataggatccaatgcaccaaaaggttcatccattaaaataatatcttgttcggccgcaagtgctcttacgacaccgatacgttgttgttgcccacctgatagttctgctggataacgctctaaaaatgactccggtaaatccacaagtttaattaattcctttgcacgtttatccttttcttctttagtccatttcaacaatttgggtaccaatacaatattctctttaatcgtcatatgaggcattaacccaatttgttgaataacataaccaatgcttcgacgcaattcgacaggattcatactccgaacatctttaccatcaatttcaatttgtccttctgtcgcttcaatcatacggtttatcattcttaaagcagtcgttttaccacttccactggttccaataaatgcgataaattccccagattgaatatctaaagagatgtcatctactgcctttttattaccagaataaattttcgttaaatgcttaatacttaacataatcatttctccttcctcataaaaaatatgacgaatgatacgcataaaataaaaagaccatcatcgcaattgttaaacaaatagagtcataagttaaacaagtacacatcatggtcttgattatgtagaattttatatttttcatctgtaatgtgaatacttaacagtaaacggcgctatgtatgttgaatttctaccgattactttgtttgcacattcgtatattcgacatttaaaactaacatactctatatgatgttattaaacattattattttatctttggcaactaaatagataactcatattttttaaaagcgaatttattatcgctcaaatggttgttttatagcaaaaaagtgtcggaaatgtgaaatattattgcaaaactcgaatttttgtaataatgcacacgcatccattgttacaggcggacaaacgtccatcagccactcacaaagtcatccttatattttaatattttcatcattcattgtagacacccttgccttttgctaacatttcctactcccaagcttgtaacggaattccaacgtcaaagtgttgcccatgacaggcacacctaaaaaaacaaccaacagcatgagccattggttgtttcgtgtcatcttgtatgttgttgtataaccggtatgctttactcattaattacttatcatgcatccctttaccttctagtatttggttaatatacttttcaacacgcttttgtcttgtttcactgcgtttagcttgtccaatatgatatatatattgatgttgtctgcctggcgttaatttataaaatgaagactctaactgtggcatttcttcgaacttagcttctaactctttaggaataacatattcctctgttttcttcatttcaacttttttaccagctttttcagctttaattgcttcagctagataatatttaatttcttcgctacgtgcttgaatctctgttaaattttcaaatcgtaactgacgagctgcttgcaccttttcagtctgttgaatgagtgtatgatatttatcctccaaaatggcacctttatgaaataatagtgcaacataatttttgaagccatggataagtactacatttttattattcaacgtgtaacaaggatgcatccatttatacgcttcctctaattctgtttcattaaagattaacgctctcaaatatttatattcttcttgccattgactctctttatttaaaaatgcttcaacttgttcatttgattgtttctcactcatagtcatcacttccattttgtttttcaatacacattgtattatatatcctaattttataaaaaactaattttacaaatgcttttgcgttcttacaaaaaatgcatttgactattattataataagcgtataattgtcgcatattattttttgtatttttggcaataacgaaggagtatttatgaataaagacaagcaattgcacaacgacaaaatcaatctatcccaattagtcttattagggttaggctctttaataggatctggttggctatttggtgcgtgggaagcatcatcaatagctggaccagcagcaatcatatcatgggttcttggattcctagtcattggaaccattgcctataactacattgaaatcggcacaatgtttcctcaatcaggtggcatgagtaactatgcccagtatacacatggctcattattaggctttattgctgcttgggcgaattgggtgtctttggtgacaataatacctatcgaagctgtgtcagctgttcaatatatgagttcttggccgtggcattgggcgaaaccaatgagatatttaatggaaaatggctctattagcacatacggattgctagctgtatatctcatcattgttattttttcattattaaactattggtccgtaaaacttttaacatcatttacgagtttaatttctgtatttaaattaggcgtacccatgttaaccatcatcatgttgatgctatcaggattcgacacttcaaattacggccattcggcaagcacatttatgccttacggaagtgcaccgatttttgctgcaacaacagcatcagggattattttttcattcaattcattccagacaattattaatatgggttcagaaattaaaaatcctgaaaaaaatatcgcaagaggcatcgctatctcactgtcaatcagtgcagtgttgtacatcattttacaaagtacgtttatcacttctatgcctcaatcaatgttacaacatagtggatggaatggcatcaacttcaattcaccatttgctgatttagctatcttattaggaattaattggctcgcaattttactatatattgaagcttttgtatcaccattcggtactggcgtgtcatttgtcgccgttacaggtcgagttttacgagcaatggagaaaaatggacatatccctaaatttcttgggaagatgaatgaaaaatatcatatcccacgtgtagcaatcatctttaatgccatcattagtatgattatggttacattatttagagattggggtacgctagcagcagttatttctactgcaactttagtagcctatttaactggcccaacgacagtgattgcattaagaaaaatgggaccaacaatgactcgtccatttagagcaaaaattttaaaagtaatggcaccattatcatttgtattagcttcattagctatatattgggcaatgtggccaacaacggctgaagttattttaatcattatacttggattaccaatctacttcttctatgaataccgtatgaattggcgtaatacaaagaaacaaattggtggtagcttatggattattgtatatttaatcgtgctatcaatactgtcatttataggaagcaaagaatttaaaggcttaaatatgattcactatccatttgactttatcgttattattgttgtggcgcttatattctattacatcggtacaacgagttcatttgaaagcgtctatttccgtcgcgcaacacgaatcaatacgaagatgcgtgagtcactaaataatgaatcaaagtcatctcattaaatattttaaaatacagtgccatatatgatttcaacacacacattaaccaaccattgatttcaacatcttggttggttttttattttgaaaatcggttataaataactaacataacaagatggcgagagtgatattgtaatgaaatgtcactgtagaagaacatcatataatgctgaaaatggtttgagttaaaacagatatcaaactcgtctgattcagtcacaaaattgtcttgttatacttgtcacctatcatctatagaccgtggtatgattaaattggggatgataaaggaggttaataaatatgaagattaatactacaggtggtcaaattcatggtattacacaagatggtttagatatcttcttaggcattccttatgcagaaccaccagttcatgacaatcgctttaaacattctacgttaaaaacacaatggtcagagccaattgatgcaactgaaatacaacccatcccaccgcaaccagacaacaaattagaagattttttctcctcacaatctacaacttttactgaacatgaagactgtttatatctaaatatttggaaacaacataatgatcagacgaagaaacctgtcatcatttatttttatggtggtagttttgaaaatggtcatggtacagccgaactctatcaaccggcacatttagtacaaaataacgacattatcgttattacatgcaattatcgtttaggcgcattaggatatttagactggtcatattttaataaaggttttcattccaataatggcctttcagatcaaatcaatgtcataaaatgggtgcatcaatttattgaatccttcggtggcgacgctaataacattactttaatgggtcagtctgcaggcagtatgagcattttgactttacttaaaatacctgacattgagccatacttccataaagtcgttctactaagtggcgcactacgattagacacccttaagagtgcacgcaataaagcacaatatttccaaaaattgatgctcgattatttagatacagatgatgttacatcattatcgacagatgatattcttatgctgatggcgaagctaaaacaatctcgaggaccttctaaagggcttgatttaatatatgcgcctattaaaacagattatatacaaaataattatccaacaacgaaaccaatttttgcatgttatacaaaagatgaaggcgatatttatattactagtgaacagaaaaaattatcgccgcaacgctttatcgacattatggaattaaatgatattcctttaaaatacgaagatgttcagacggcgaagcaacaatctttagcgattacacattgttatttcaaacagccgatgaagcaatttttacaacaactcaatatacaagattcaaacgcacaactatggcttgctgaatttgcatggcatgatacttctagcgcacactatcgcagtgcttaccatattctagatatggtgttttggttcggaaacttacaaatattagcagcacatcaatatccaacaactgctcaccttaaatttttaagtcgacaaatgcaaaatgatttagctaattttgctaaaagcggtaaaatgccttggccgatgtatcataatgaacgtcgctattatcgcacatatcaataacgttatcgcatctaaaaaagcacacctgaatttgatagcaggcgtgcttttcatatgagaattatgatgatttaaatgttttagcataatgattatttttcaatgtgaaaacaacgattaatcctaatgcgccaatgatggcactcgtatacgtgatagcttgaacagaaacatgtgtcatgaccaagcctccaataatgccgccaacaccaataccagcgtttaaactagacatgttccaactcattacttggcttgtgtcgccttcaacatgttgaatcacaccgctttgcactgctggattagtactccattgcatgatattccaaataaatagtcctgctaacaatagacctgaaccaggtaagattaaattcataagtaacatcataacgataaaaatagaaacagaaatcattaaccaacgcttacttgtaattttatcggagaatataccacccaatgatgttccaataacgccagcgattccatttactagaagtgctaatgaaacgaatgacatatcatgaccattagataaaataagtggatttataaagacgaatgtcactgagtttgcaatcaatactaaaaacgtaataattaaatattttgctacttcagcaggtcttaatattttcgaagtaacatgattttcatgagatggtgtctcatgattcacagggcctcgttgtatttcctgatccttcggtaaatagatcatcatcaagaagccaacaataatactcacaataattaagaatagaaatgtatagcgccaacctactaaatcgccgataaccgttccaattggtacaccaaaaacattggccccactaaaccctgtatagacaagtccaatcattttaccacgatttttaggtgctgataacatcgctgtaatagctaatacttttacgataattagtgctgctgctgcagatgagataattctaccaactactaatattgaaaaatttggcgctacagcaataatgccattaccaatgataaatataagtaatgtccataataatacaggccttgatgaaaaacggttcgttaatttaaccagaataggtccacatatcgcaaatgttaaagcgtacattgtcactaattgaccaacgacagcttctgatacatgtaagtcctgactcatcaagttcataattcctgcaaccatcatttcaaccattcctacgataaaaatacttaaaatgaatgtaaatagtcgcatgattgacattttaaaactcctttcaaacaaaatttccgatattcatttcccttagaataacgatttattaaaaaatgtgtgcaacacaattttatatataaccgttctattatataatattttgctttaattttctgtgcttaattggaaaattattgaaattgtttttcagtatttgaaaaattaacacaagtatgtcatttaataattatgtataattacttcagtttcaacaatgactcccaaaaagcacgcacgctttatatgtcagaacagataactgactacaaagtatgcgtgcctttatgaatattttcgctgtgttaatgaatagcgatactatatgtgcgcgtcacttcatttccaattaaaactaatacctaaatctgatgcagtaaaatctatcatgattcactcttaacatcagtatttcgtgctactaattgatgtcttgcattgaaaaattgaccatagcttaaatatgtcgcaatcaaagcagacataatggtcgcagttgtatgaataaacacgactaacaattgaaatttaatcgcttgtaaaggtggtacgccaccaataattaagcctgtcatcataccaggaatcgacacaagcccatatgttttaaccgaatcaattgttggcactatagctaaacgaatactttcacgtattgcacctttagaagccaatttaggtgtagctgcaagtgataatttagattcaatattagtaccatcttgtacgaatgcacgatctaaattctggtaagctaaattaattgcaatcaagccattattagcaagcatgccgccaataggtataacttcattggctgtaaattgaatggcccctgtcgcaatagtacctgcaagcggtaatgccgttccaatgaagatagctagaaatgatatccaaaacacatgatgcatcactggtgatgctcgactaattgtattccatgatgcattaataataatgaccaatacacataaaataagcagccatttatcgtttattttaaaaatataatgcagcaaaaatcccaaaatgattaattgcacaattgcgcgtagtgtcgcaacaattaaatctttaataatatgtaaaccttctttatatgaaatgataatcggaatgactaaaagcaatgccgtcaatccaagtgccgtattactcatgttgattcaactcctcaaccttagaaattttgccatcaacaatcgttatgcgcttttgaaaatgtctcatactttgatcatcactatgggtaatccacatgatagcaacatcctgttccactaacttaaaaatgatattttctatcttttctttattatgaacgtctaatgcactggtcgattcatctaataaaagaatatccggtgtatacatcagttggcgcgctatagcaattctttgccgctcaccacccgacatattttccacttccgaacttaattgataatgtcccaaaccgacatctttaattaattgctttgcacgttttctatcaaatttatcattacgtgcaagtgatgggaatatcatgttatcttcaatcgtttcaccaaacaagtcactttgctgcatcaaataactgattcgttgacgcaattcttccgggtcataatcattatagggtttacctttaaaataaagttctccactagttggactaatcaaattacatatttgcttttgaaatgtacttttaccactacctgatggacctataatggcaatactctcgcctttatctacttttagactgatatgatctagtatgattctatcgctcgctttatacactaaatctttaatttctaacaacatttgcaccgctcctcatgtaatatatcaggtatattattcccgtttttttggtttttagtgcaattatatttaagaaaaaatcattttcttgtaatatcaaaatttaggcataattgattttcagcatttaaattaaaaacaaaaaatcctattaacatggatactgtctaatgactaagaattaaaattagacaattgtttaacaacctaccatattaaaaggattctttattatttgtggattgggttaccacatgatatttttataactttcatcatttaatgaacggacaatttcagtaacaagacggatagaattttcataatcatctacattgagcactgaaacattagaatgcatgtatcgcagcgtaacaccgattgtcatcgtgggaataccttcatttgcgacatgaatacttcccgcatctgtacctccacctggtgtcgtatcccattgtacttcgatgttatgttccttagctacatctttaatatgcttacgcaaaccttggtgagcaatacttgtagcatccatcataatgacaactggaccaccgcctagtttactatcgctcgtttgacctgacatacctggggtatcataagcaatacctacatcgacagctatcgccaagtctggtttaatcgtattcgctgccactttcgcaccacgcaaaccaacttcttcttgcactgtggcaccactgtataagttaatgccaatattttcatcttttaaacgttttaatacctcaatagctaatgcacagccatagcgattatcaaatgctttcgcagttaaatatttatcatttgcaagcacttcaaattcactatatggcgtaaccatattgcctacttcaacgccagcttcttcagcttcttccttgctactaacaccaatatctataaacatatttttgatttccattggctttttacgttcttcaggcgttaagacatgtggcggtttagaaccgatgatacctctaatttctttgcccgaatctgttgtaatcgttactttttgagatagcatgacttgattccaccatccaccaactggcgtaaatgaaataaaaccatgtttatcaatctttgttaccataaaaccaacttcatccatatgaccagaaatcataattgagtattgaccattctcagcatttttctttccaaaaatgccacccaagttatcttcaataatttgatcactgacaggctctatatagttacgcattgcttctttaacttgcatttcataaccagcaatgccgtttacatctgttaaatgtttaagtaatttgactgactgattcatgttattcatcctcctgtatttcaactttaaactattgtatcactaactttcagaaaaacgttccctaccgctttatcattttcaggcttaaatatttttaaaattttgtgaggaatccgcttaaaaaaactcatatttctaaaatttaatattccgaaaaagtcacaatttaaaatcccttattataatacgttattcttttattgttactaatttcaatctgtttagtcttgcgctattataaaattaaaaagtgtagagataacaacgcattaacgtcgctattttccctacacttaaatactagtttctttaattaacttatcattaaagttattcagatattgaatattcattaatcataatgtgaccatgccgatagtattaatacttctttatttcgatcatctacggtatagacgaccctgtgctgatggttaattcttcttgaatatcgctctaaatatttaggctctaatttttcaaaagattgtgttattttatacggatcattttttaaagtctcaacaatttctaaaaatgacttctttaaataagaatgttttattttctttaaatctgatttcgctgaatttttaatcttaaccgtgtaattgctcattaaagattatcccaatcaatatcatctatatttgttgtaccactattatctttttctctttctcttactttgtccattgtaccagtagattcaagatatattgtctcttgtatacttttccaatcttctaaacctataatcacagcattattttcggcattattgccactaatataaattggttcgtgattattattaacattttttagtaattgataaaaatcttttctcgcttctgtagggctagtgataatcatataaaccctcctttgttttctgttacgctaattatagcgtacgcacttgagtacgtcaatattaccaacgagttcatcgtattcttaatacctatatgctatcgtacacaagcttttgttcttttcttccaacataccgtctataatgctcaaaaagaaatcagcagtggaacacactacgttccctaccgctttatcattttcaggcttaaatatttttaaaattttgtgaggaatccgcttaaaaaaactcatatcttcaaaaaaagtgacaaaatttaaatttttgaataacatcattttttagtaaatgttataatttctttataatacaaatatcgaaagaaggcgactgactttgaaaaaattatgttcattaattgtagtagcattagtttgtatcattgcattatcagcttgtggtaaagaacaaaccaaaacatatgaaggtgatgttagtggtaaacatgtactaacttctatcacatataaagatgataaagttttaaaacagtctacaatcaacacaattaaatatgacgatctaggtatggataaagacgaagccaaaaagttattcgccaaatctgaaagtattttcaaagaccttaaaggcgtaaaatacaaagtagactataaagataaaaaagcaattgaacacttagacatagattacacagaagttgacatgaaaaaattaaataaacgtcttggtgtttcaactaaagaaaataaagatattagttttgaaaaacttgaaaagcaattaaagcacagaggcttaaaagaaaaagataaaatggacgacaaatagtttataacataaaaatgccctcagataagactaaggttacaaaccttaactcatattctgagggctttaatatttgaaattcttgtgtgaccagcatccactactaatataaaattatttgcagtaacactaaaatccgctgctttcattttctcgaaatagataaatcaactaatcaattttaatttataatcatgtatcgtttgtaactcaccatcgacttttcgatatacaatatgatcagcagtaatttctgtaggactggatacgccaacagctgctgcaatattgaataagccttcatgcaaacttgttacatagtttgtgacacgatattgcttttctccaacaatcaatgctttttcttttttagcatctgttgttgcaacaccaactggacacgtattcatgtgacattgttgactcattatacaaccgacactaatcatcatcccacgtgcgatatttacaaaatctgcacctaaacctagtgcaatcgcaattttatctggtgtcactaacttaccagatgccgccaatttcactttatctcgaataccatatttttctaacatgccagacacaataggtagagctgtaaatagcggtaagccaacaccatcttgtaattcttggaatgttgcaccagtaccaccttcaccaccatcaatcgtaataaagcttggatacttatctagttccaccatcgtacgtacaagtgtttcaatttctgaaactttgcttactacaattttgaatcctactggtttttgacctaattgctgcaactgatcgacgaaacgaatcaaatcttcagcattatgaataaattcgtaacggttaggtgaattgattgttttataaggttcaacatttcggattttagcaatttcttcgtttaccttttcagcttccatatgaccaccacgagtcttagcaccttgtgccaacttcagctcaaatgcgcgtacgttagataactgtgcaacctctttaaataaaccttcactaaaattaccttctttatcacgaacaccaaataaaccgggaccaatttggaaaatgatatccccattaccttttaaatgatattctgataagccaccttcacctgtattcatccaagtgcccgctttagctagacctttagataaagctgtaatagcattttttcctaaagcgccataactcataccagattgtcctacgatacgttttaaaataaatggatgttttaaacgttcacctaattttattgcatggtcatcacttaagtaatacggatcaatctttgtcggtacacgatattcttcacgactaaataaacgctcattcgcgattttataaatgaatgttgataacaatgttgtattatctactgaaatctcattacgttgcatcggaaacattgtgttctgtatgtaaaagccgtcttgataatctttagtagtaccgaagctggtcatacgagagttatattttccagccaaaacgatatttttatagtcattacgtgaaaaaggtttcccttcattatccccagaaaataaatactgacgtaattccggtcccattttttctgaaatatatctaatacgtgctagtaaaggataattccttaatacactatgttgtgattgtcttttatctttaattaaccaaataagcccgataacaataaccgtaagcaggaagcctacaacgataatgttaactataaattgcatgactgtaagaaacgtcattacaatccctcccccaaaaaatttcaattcaatatttatgatacaccttacaaaataaaacacaatggaagcgtttcattttataaaacaattttatgatatgtttttcattttaaattttaatgtataaaacatacaatacaaagtaatatgtgctaaagtatctatataatacaactatttaagaggtatactatgtcaaatacaaataaacattacatagaagaagaatacgctactgaacaatctcgttttttcaaacgtgatattggatttattttcctttatatatttttggttaacatcttgccaatcattatcgtctttttaacttttgggttagtagctgtattcactcaacaagccccatggggtttctcttttcctatttcaatgaacattagctatttactcgcagttattatttcactagctatttttcgtcggatgcatgaagatgcgtttattccaatgatacgttcgcaaatcgttgctagtgctaaatataaatggcatattcttatatcatttacactaagtgtcgtactctttttacttttaaatcatttcaatattttcgcactaaatgtagatgcctttactgtctttgacatttacccgctcattaaagggtatggttccatcagtttaatagctatattttcgttaaccattatattaaatactttgatttgtcaacttattttccgtcatattttaattcaagaattaagcagattaatccctttaaagattacaatagtattatccgttattcttgaaacactgtactattatccatacattaatacatggtgggaattcattccagcattgatactagcaagtagtgcgacttacttatatttaaaatcataccgtaattttatggtgagctatttttatcaattagcagttatactcgttttgcatattttcatgtaaaatatttcagagtattatccattatccatacacatcaaaaagcacacttaaaagtcagtatcgcaactcacttctaagcgtgctttatttagatatactgtcgttctaaaaacgagccatatagagagcctgagacataaatcaatgttcaatgctctacaaagttatattggcagtagttgactgaacgaaaatgcgcttgtaacaagcttttttcaattctagtcaaccttgccggggtgggacgacgaaataaattttgcgaaaatatcatttctgtcccactcccatgaatcgccatgctcaatataccttttaaaatttaaatattcattaacttaatatgctttaaactttttcattaaagactactcgctgggcgtggtgttggttttttcaataaactcataatcattattacaatgactaacataccacaaattagatacatccatttaaatcctactaaatcggaaataggtcccatcaatgcgccacctaacgatatacctaagtctgcacaggcaataaataaacctaacaacatattacgacctacttttggtaagacgaagcttaagtatgatgttaatgttgggtacaccattgcttgtgtcattcctattaatattgcactaccatagaaaataattgcacctacttgcggaccaaatgccactacaaatgacgcgatcactaataatgatagtacagataccatatatttaggatgccacataccatctgacggaatgtatttccttaagtaaaatcttgccacaacaactgcgatggcctgtattgtcaaaaagattcccgcattcgcgaatcctaaactcactgtgtataacggtacaaatgtactaactgcaccaaatacaatcgatgcaacaatcatgataataccactgttcaacaactctttatttttgaaaaattgcgcaaaaacagttacagcgttaaacggcattttttcaatcttatctgacgtatcgggttcctgttcagcaaaggtcacgcgatagccaaagaatgttgttgttaatgcgataaagataatgacaattgcaaatagtgaaatattatttgcattccaaatacctacggcaactaatggtccaattaagtttggaatcgttgaaaatagcgagtacaatgatacaccttcagaacgatgttcctctggtaatgcatcaataatacctaactgtaaagacatagaaaagaatgccgtacacacaccttgcataacacgtgctacgaaataaccttctaatccagtaaaaccataaataattaaagctatggcattgatgatcaaaataattcttaatactttaatgggaccgacacgagcaataatttgtcctgcccatggtcgaaacaccattgctgttaacatgtatgcccccataacgataccgataaccgtattcgttgcgcctaaatcatgccctcgtaacggtataaatacgtttaagattgcattggcactaaagaacatcaatgttaatatatataatctcaaaaagggccaagccattgcacctttcattatctcactccttagaatgatagttgtttttctattaattctcttgtataagcattgtcacttttatgcaatgcgcttgtcggaatttgttcttctatttttccgtttttaaaaataattaattgatcacataaatacgtggcagcttgaatatcatgtgtgataaaaatataactcaactgacgcgtttcacgtaaatgaatcaataaatctaatatttgtgtttgaattgacatgtcgagtgaactaatggcttcatcaaacaaaatatatttagggttaatacatattgcacgcgcaatcgcaacacgttgcgcctctccacctgataacatattaggatatttatccatgtatgccttagatagaccgacttcttccaacaatgtaattgcttgaacttccataacatctttaggttgtccatcacattgacacatcacttcaaataagatttctctaacagtctgaaatggatgtaatgatgacgtataatcttgaaatacagcaccaatttgatgacgtctcactttcttcttatgcatcggttgatcatttaaggttacacaacctttatccggtttctcaatacctaatatcatacgactcaatgtcgatttaccgctaccactttctccgataatcgcaatcgtcgcaccgattggacactcaaatgacacacctttcacgataggtgttcgacgacgcttaaaaacatgtgcgctttgatatgacttttcaacatctttaattttaatcatgtacatcacccctcatcacatgtttaaaatgatcattaatcttcttcttcgttgataataaatacttcgtataaacatgttctggatgatgcaagactgattcacgtgtcccttgttcaataagctgaccatttttcatcacaacaacacggtctgcaatcttgttaataaccgttaaatcatgtgaaatgaaaatcatcgcacagtcaaagtgttttttaatatctataaatgcttccagtacatcatattgtgtaattgtatctaaagccgttgtcggctcatcagcaatgattaactttggtttcaaagctaacgctaaagcaatcatcaatcgctgtaacattcctcctgataacatgtaagggtatgattttaatatacgtttagaatctttcaaacttaaataatccatatattcaatcaatgtcttttcaatttcttgtgtagacattgacgtatgtactttcatagtctcaaacatttgtttaccgacagtagttgatgggtcaaaggcacgactaccttgttgcatgaccatcgcaatgtctttaccacggtactttttcaattgcgattcagataatgacaacattgatgtaccatcaaagataatttcacctgtcaccccgagtcgttcgagattcaaaccaataatcgatttacaagtgattgatttaccgctaccactttctccaataacgcctaaagtttcacccttagttaatgtaaaattcacatcactcacgagtggttgatctgtccaggtatctgtaatcgtcaaatgtttaactgttaacaatgtcatgattgcaccactccttttttcacagaacgaagtttatctttagaagagatgcggggatcaatagcaatttgtaaagcatcggataagaagttaaatgccatcactataatcactatggcaatacctggcgcaaacatcatttcaggatgtgtaaacatcacttttctagcttcgttaagcatcatgccccactctgcagtaggcgctttgacacctaatcctaaaaatgaaaagccagatatttgcaagatcattgaacacatcgaactactagagatgatagcaatatctgctaatgttaacggcataatatgtttgtgaataattttcatatcattcataccgattgttttagcaaatcttacatggtcagaagcagtgtactgcataacacttgtacgtataacacgacagaaccatgcccaacgcgtcaaaataaatgccatgataatattttcggcacccataccaaacaatgcaattaatgctaacgttacaacataacttgggaatgccaacataacatcacacgcacgcatgattaaggcgtcaacaaacccttggaaatatcctgataagaatcctaaaatagatccaataagtacagaaacaaatagcgcaacaaagacatataacaaacttggtctaatcgcataaattaacctagttaaaatatctctacctaaatggtcagtacctagtagatgttgaaaactcatgccagcaaatttgtttgctgtatcgatatggttaggatcataaaatgtcacaagtggtgctgctaatcctaaaaagacatataatacaataatgcctaaagcaattactgcacctttatcttgtaataatcgttttaaaattatcatcgtgcgccctcccttaatcttggatttaatagcgcattaatgatatctgctaatgtattaaatacaataaataataccgctacaattaatacatatgcttgaataactggaaaatcgtgttcaagtattgcttttaaacttaattgacctagtccaggccatgcaaagatatactcgataacaactagtccacccattatcattggtatagacatacaaaagattgataccgcaacttgtaaagcattacgcaacacatgcaacattaatgtgatagatttcacaccgcttgctcttaaataaagtacataatcttcatttaattgttccaccatcgagcgtctaacatttctaaagtaaatagcagcataggcaatcgtaataacgatcactggcaatatgtaactttctggacctgttaatccagaagtcggcaatatgtttaacttcactgaaacgtaaataataagtattgaagctatccaatatgatggtaatgcagttagaaagaaagccactgaacgtatcgcacgatcagtgaactttcctctttttaatgcactaactacacctaaaataattgatgtaatcatcaccataacacttgaaattattgttaatttcaatgtattcataaatgctggaccaatgcgttcagcaacaggatcacctgtaatgtagcttgtaccaaaattaaattgcatcgcttcaagtaaccaatttttatattgaattaataatggatcattgaaaccgtacttctcattcgtttctgcaatcaactctggtgttacatttggcgtcccttgtgcatgtaaaattgtcacagctggattttcatttgtaatatacgtcaatagaaatgtcataaaacttactacaatcactaatggaaacatgagcgcaatacgttttaagataaatttgaacatctaattgctcctttatttatactgcatttcattgaatggtaattcatactgtgattgtgtgaatgatactttttctaaatctttcggcgcaacaactgtcatactaccgtgtgaaatagggataaagataccttcatcatcaatttgtttcaaaatgtttttataagcgcctgaacgctctttaccgttttggattttaaatgcgtcatcaatgctgttgtatattttatctttgttctcaatgcctgatgttgcactttcataaccatttttcgctttaaatgctgcaatagtactttgtggatcgtacaataatccccaagtttggttgaacattaagtcataatcaccagaagtacgacgttcagcaattttatctgatgtttcgccattgatgtttaacttaatacccattttcttaaattctgcttgtaagtattctgcttgttctttttgacttgaagaacctttgtcatagtacattgccatttcaaggtttttaccatctttttgacgaacatcgctgtctttacctttcttccaaccagcttcatctaataatgattctgcttttttaaggtcatacttacgtgttggcatatcgaaattaatatctgttacatttttcgcaaataattgagttgctggtttttcttgaccatctaaaatttctttggcaattttatctctgtttaccatatgaccaatcgcttgtctgactgttttgtcactcacagcgttatcttttttaccagaattgacaactaacattttcgtattcataggttgactacgcttaacttgatagtcacctgtatctttcaattgttttaaagagtctttgtctaagctatccgtacctctatcatctgtgaaggcaaagttcgtttcaccttttttcattgataggaatgctgtttcaccagcaggcattacttttgcttgtactttgttaagtttagacttttcgccccagtattgatcatttttgttaaagtctgcagactcatcttttttatgttcacctaatttaaatggaccagtaccatcgaactttttaacgccatcttttgttgtaccgtttttaaagtcttttggagacacaaatacatatggacgaggcatcgctaattcagccaatgcaggttgatatgcttctttcaaattcaattcaaccgtgtacttatctttaactttaacattgtcaattaatgttgaaatctttaaccaagaatgcaattttttattttgttgaaccgcatcaatatttttcttaactgcgtcagcatcaaatggtgtaccatcatggaatttaacgtcatctctcaaatggaatgtatatgtcttcccatcttcagacacatcccattttttagctagtaaaggcttaattccatctttcgtgttacgtacaagcggctcgtatatcatactttcagcagacatcgatccaccgtaaacatgcggattcatatcaccgatatctttaaccgtcgtatacgttaattgcttgttttcttttttctcctctaaacctttattaccgccacaaccagttaaaattagccctgatgcaagtaacattgcactcattttagttagttttctcatttgcttttcctctttctaaattgataagttgcattacttaatcaaatcgtaatgattatttttctcaattatttgcttatttttatgtaaatgtcaaacataattcaataatttttttctattataaaacttcaaacccttattgtgaaagcgttctattgatttccaaaaattttgtgacgagtgctttatctccttcaaatagatttgtattaaattgagaagataagtgttgatcttgatgcatatccttgtacgcctggcaacttgcttcatagcgagttaggaactgatcaatcattggcgttttgatacctagcattttcccaatatgctgaatcatcgccgttctgtaataatcttcacttggcattcttggaatttgaacaacatcctgttcatttttatagacttgcttaaatggtacagctgaaaaatcaaagtaatgtccgttttcgtctggctgtgaaaatggatcaatgaggattgcggtatatcttacataaagcagatattcttgtaagatatctggcaagatttcgaaatgctcaatatcaccttcatccaaagtttcaggacgtactggataattttccttcaccataaattgaagcaggttgactgacggcactctaaatgcttgtaaaatagccatcatttccttccacattaaacgcatttcacggattagtgtcatcgttatcggtccttcaggaaataacttatacacataaaccggtacatccgtcccttcgaaaatggctttcaatgaaaagtcattcataaatagtggtgggtgcacataaagcgaactgtttcgcgtttcagcgtgcagtggcgattcaacgacttctaattgaattttcaattgctcagctaaagcagagattcgttgacacattgttgagtttgaatgtgtcgatcccatgtacaatttcttttttacacctgttgtcaacacatgattaggcgcttctttatcaacaatacgtgtatcgccaagataagttgagaatgaaatcacttcgatatctttattaaatttagacataaattgttcgacaatcatttgcgaaccaaatgtcggtgatattaaaatgacatgtttgacactttgcaaagtttctaacgacaattgctgtagtgtgtcataataagcatctgctgtgcatgccatgacaaccgtttcgtattcaccattaacgtttttaacgtctttatacaaacgattaatttcaaacttaccttccagatgttgatgcgcctcgttttgtattttgacttcaaattgtttctcttttttatacgcttgatataagcgttttgatttttctgatgttgaggcacgtccaaccatatcaatctcataatctgattttaaatagcaaatattcgctaattggattgcgaccggaccagtgcctatcattaataatttagacatccgtaatacctacctttatagctgcttttttataaagtgctatatcaaaaatttgctgtggtctcatatgtttattcacacattgccacttatcttccgctgtttcttgtgacggataattaaatattgctttgatgccatcaccaaagcgcattgcaactacgacattttcatttgttaaatcatataattcttctaaaatgctgtactttaaaggaattgtcgagctgaatatgatatgcgtcacatctttgatatctttaagttcagataccttttgatccgtaattgttatatcttcatttggtgctaagacgttaacgattctgcgccctaggtcaacggcttgtggatcaatatcaataccgataactgaagcacctgtttcttttgctacttgaattaacgtcattggatatgcacctgaaccaactaacaataatttgtcattgctagctatactacattgtccaaactcttcatcaatacaatgttctatattgtcaaagtaacctgtggtagacgcctgtccgtctaatagacgtctcgctctaatgacttccacttgtttaacacactgcgctgtaatatattgcagtgattttattaattgtgctttttcttcaacgtcacgccaagcattaaattgttgttcataaataggatttaaaataaattcactatagtcatccatcaatgtttctaatgcttcgatatattgatcgtcttgtaatacacgctcgtaatgcgcttcaaacttttctaaatattgttgtaatatcaatttgatttcattattaaagttattcattgtaggctccttattctatatatgcttttcctgtagctacagttgtaacctgtcctttaattgaagtttgatatcccaattgatgacatcgctttgatgtcactaaaatactgccccctggctgatgtactgtaaaatctttgcatgcgtcattacgttgataattattaaaaaccccaattgatgctgtaccagaaccacagctattttcccaaattaaactttgaatttctggtatatagattaatggctgtaaaaattgacgttgttcatcaaaaagcatcatacctactgttttatatttgtgactccattgttgctcacgcacaaacgcttcaaccaaatgttgaatttctgttgttacttgtttaactggaatcacataatgtacatatgtttcataaataatttctattgctttccatgaatgattacccatattaattgttgttggcacaacacgatgggcttgtggcatttgaacttcatagtattggcaatcatgaattgcgcattgcactaaatccgaacagccagacaccttcaccttaaactgttggtctttaagcaaatgactttcttgcaaatgatgtatatatgacatcgtcgcattaccgcaaaattcattaccgctcataactaagtgaaaatcattgccatcatcattttgtgttgattctataaagcctacctgttcacaacatacatgtgttgcggccatcaactgattggcgatagatgcatattcactagcatcatgttttgaatgaacaagtatcgtcatattccccgaaggattatacttagaaaattctataacctgccgattcatacgacactcctttagatgtatttttagagcctctgtaattttaattactagaggctcttatgcagttgttgcgaagcaaacaactgtattcctctaaacctgtaattttttagaagatgaacctaatagctctatctagtaggtaagtcatgctaattcgcaaaagcgaaaaccatggctcttatgcagttgttgcgaagcaagcaactgtattcctctaaacctgtaatttttaatagaagatgaacctaatagtttcccatctattaggtaagtcatgctaacccgcaaagtggaaagcatgacttagtaatcggttgttgtatcaacatgcaaccgtaaaccttatttaaagttgcttcttgtggctctacaagcgaatgcagttgtccgttaactacattcacttagatgcttttactgttttcacctcaactaaaacttcaaaaaagttgcagaaaacaaatcgtaactattacgatttgattatatactatattagttgagaatcattgtcaataaaggttgtaaatgaatgcacatttatattttgataatccttccataaacatcgtattctcagcacattcaagtctttttgaaaatttttatcaataattgaatagaagttccgttctcgtcagttcaaaattttacgtaagttgtctctgcgtattgctttagtgagaataacccacacttgtggaaacgtccttttgttaatctacaatggatccccttgtctttcgctaacatttcctatcaccaatcctgtaacgaattttcatcgtcaagttgttgcccatgcaatgcgcaccaaaaaaagctttgtacaatttcgtacaaagctttaaaaattcaaataaaaatatcattattttaatgaactagccatatcagattttatttcgtttgctaatacttgtaattcagggaaataattattagcaaagccaattattattttattttttacaaacgtgttaatatctcgatcttctggaatcgtattttctattaaattcaaaagctcactatgacttatgttctctatacttactgtatttaaatattttaaaatcgcaagatacaattcatcaaatacttcatgttcaaaatcaaagtccaataataataaactaacggaattagtttctaactgattatctccaattttatctgcaatctctcttatagcttgatatagcaatctaaaactttctttttcttttaacataaaattctccttaatttattagaatagacaaaatacagcttattttaaagatactccaaaagtttgaactcgagattctgataaattagatgcacgacctacaatacgttaaaacaagctttaagcaatacacttcaaatgaacaatatgtgattttcaaagattaattaatctcggctttaaatgtctttcattgcgacaatatgcatacattgcctacttcatgccaaattcttttccactggatatcgattttaaataattattccaatgtccgcttccacgaatcatcactcaacatctcgccaggccatgtgtaagccataacaccaccgtcaatacgaattgtttcacctgtaataaatgaactctcatcagatgctaaaaagacaacgagcttgcctacttcttctggtttacctaaacgtcccagcggtgtcatccatttctgattttctctgaatgctttgccttccttatcttcactcgtacctgtcagtttatctactaacggggtttcaatcgtacctggtgcaatcgcattagctcgaatgccatctctaccatattcgattgcaatggatttcgtaaaattaatcactgcccctttcgcagcattatatcctgagcgatacaaatctgctgcctgtcctgaaaatgaagatgtgttaacaatagagccacctttagtcatcattaaaggtaacatcattttcgtcatcaaaaatgttccacgcatatctacattcataatcttgtcatatacatctgttggatactcatgaattctaccagccgcattatccacaccggcattattaaataacacatcaacatgcccaatctgttctctaatttctgatgcaaaattgtcaatttgttgttcgcttgctatatccacaatataagcctttgctttgtcaccattacttttaattttatcgacagtctccgataccgcttcagctatgtctaccgccaatacatacgcaccttcttgagctaaagcgattgcagaagcttgtccgatacctgtacttgctcctgttacgactgcaactttattttccaaacgtttcattcagtcactcctatacaacatatcttaaacttacagtccttattttccactgttcaatgcttcataaacctaatagataagtctccaggcagtcttatctactctctgctatacaatttctattgaataactcaaaatatttaacaatattagatttttcattttctgaaaattgttacttttgagagtattttttgttacactttaaatatttaacaaaggggggaatcattgatgacatcaaaacatcaacaaaaggggtctatcgtcaatcgtttcttgaatagtgttgaaaaaattggaaataaattgccagatcctagcgttttattctttttaatgtgtgtgggcttagccattatgacgtggtttatctcattatttaatgtatctgttaagcatccaggtacgcatcaaaccatttatattaaaaatataattagccatgatggatttacgatgataatgaatgatacgattaaaaatttctcagagttcccagcattaggcttagtactagcagtgatgattggtattggtgttgcagagaaaacaggatacttcgacaagttaatgatttctgttgtgaatcgcgcaccacgtttcttaattttaccgactattatattaattggtattttaggtagtacagccggcgatgctgcgacaattatcttgccgccgctcgcagcgatgctttttattaaaattggctatcatcctatcgctggactaacgatggcatatgcttccgctgtaggtggctttgccgcaaatatagttgttggtatgcaagatgctttggtctattcatttacagaaccagcaacacgtatcgtttcagattctattaaaacaaacgttgctatgaactggtactttatcgcagcgagtgtcgttgtattacttcctacgatattgctagttacaactaaactgattattcctaggttaggtcaatatgatgatcgtttaatgcatgatgatcatgaagaaacgtcttcacatattactgacaaagaagctcatgctttaaaatgggcaaatatcagtttcatagtcacaattattttattaattattacagccattcctgaacatagctttttaagaaatgctaaaacaggcagcttactagacgatgcgccattaattaacggtgtcggattaattattcttgttgtatttttagtacctggattagtttatgggattttaagcaaagaaattaaaaatacaaaagacttaggtaaaatgttcggcgatgctgtaggatcaatgggaacatttatcgttattgtgttttttgcagcacagctacttgcgtatttaaagtggagtaatttaggaattatcgctgctgttaaaggtgccaaattattagaacatcaaaacggcattgtattgatactaggtattattgtactgagtgcaatggtcaacatgttaatcggaagcgcatcggctaaatggggtattttaggaccgatattcgtaccaatgttaatccttatcggctttcatcccgcattcacacaagtcatttaccgtgtaggagattcaattaccaatccaattacaccgatgatgccgtacttacctttattattaacttatgcacaaaaatacgataaacgcatgaaactcggagccttactttctagtttaatgccgtattcaatcgcgctaagtattgtgtggacagtatttgtcattatttggttcctattaggtatccctgttggaccaggtggaccgatattcgttaaataacagtattcaaagggataaattaaaatgccactatacaagatttgacctgtatagtggcatgatttgttatgatatagcgttcgagatgaaactctgtatttatatgaagaattatagtttatcactaataatatttagcctgttccaaccgttaatttggtttacaacaaagacaagatcaataatttgttcttcatcataaaatgattttagccggtcaataatttcaaacttcttaaagtctttgattgaatttaacatttctgcaaattcaagcgtcactttttcttgatcagtaaataaatctaaatgtctaaaactcaagacttcatcaattttcatttgtgttacacccaattcctttaattcttttttatggatatcaacacaataatgacaaccgttaatttttgaaattaataacttaatcaatgcactaagttcatcattaacgggtgattgatgaataaacttttcaccttggctcattacagacattaactctccattttgtttcttgtaattatacggcatttgcaatctctcctttacattgtttaataccaatccagtgatactacacttcgaacaatattggatagaatttgaaattctgtataacatcttgtcaatctatgttttagttaaaacatttagcgcttatatttaaaaaatatataaaatatgaaaacagattgaaaggatattataccttgctctacccttttttataaaaaatcacacacatttgagaaaatttgataatgtcaataaaccacgtcatcgacattgttattcgatatatattgttcttataatggccaaactattattccatttaaattaacgtggttcgtttgtgttaatgtactgtacaaaactggggaagtattggtgatgatgaagtgattgatattaattgcgaaacaccttcgatagcaatgacatagattattggaagattaaatcaaaaataaagaagaccctagtggccttcttttttgtctaattcttctttaattttttcaggagattttaattgatttgctggttttagtaactcacttaatctttcactttctatcatagtaccaccaaactgataattatgttctggagacccatatgcaacaaaatcagcttttttgttttcattgatgtaaccttcaattacggcatcgcccataggtcctctttttaaacttgtgaaatgcacagatttaatcgtgtttggttctttggtattatgcttgagatagagtgtaatacgctcctgttgttctttgtagtaaagtgctttttgtttttctttttcgtcatatttcatttttaaataaatgacggatgcaactatacatatacataaaatgacaccaataattataaaaccatgttttttggacattaaagcaactcctaactttagtgactcttctttttatttagttctttttttatatcatctggtgattttaattgatgcgctggttttagtaactcacttaatctttcactttctatcatagcaccaccaaactgataattatgttcaggtgtagcataagcagtaaaattatcttttttgttttcattgatgtagccttcaatcacagcacttcccataggacttgtttcaaagttagtgaaatgtacagttttgattgtgtttggctccttggtattatgcttgagataaagtgtaatgcgctcttgttgttctttatagtatattgctttttgtttttctttttcatcatatttaattttaaaatgtatggccgtaacaactatacatatacataaaatgacaccaataattacaaaaacatgttttttgttcattaaagtaactcctaactttagtgactctactttttatttagttctttttttatatcatctggtgattttaattgatttgctggttttagtaactcacttaatctttcacttttaattaaatcacctacaaattgaaagttattttcaggtgatacataggcaacaaaatcatcttttttgttttcatttatgtaaccttcaatcacagcacttcccataggacttgtttccaattttgtgaaatgcacagatttaatcgtgttcggttctttagtgttatgcttgagataaagtgtaatgcgcgcttgttgttctttataataaattgctttttgtttttctttttcgtcatatttcattttaaaatagatacttgcaacactaattaatatgattaacataatactagttaatattaaaattttctttttcgacatctatcaccagctcctaaaatgtggtgggattttatacagtttacatatttatgatactacaaaacacactcttacaaagaaaatctataattttaatctaggtcaaggaaaagcagccaaaagtgtttatataagatcaacgaaatattgcgggtataaagtggttaacagataaatacagtggaatgttgtactaaaaattcaagtttttatttttttgtgtaagtgtgattagcttgaaaacaaaattaaaacgaccgcatagttttagcggtcgttctttttagaatctagttctttttttatatcatcaggcgttttggtttgatgtgctggttttaataacgtgcttaaatttttacttttgattaaacttccaccaaattgataattatgttctggagacccatatgcaacaaaatcagcttttttgttttcattgatgtaaccttcaattacggcatcgcccataggtcctctttttaaacttgtgaaatgcacagatttaatcgtgtttggttctttagtattatgcttgagataaagtgtaatacgctcctgttgttctttatagtaaattgctttttgtttttctttttcgtcatatttcacttttaaataaatgactgtagcaactatacatatacataatatgacaccaataattacaaaaacatgttttttgttcattaaagtaactcctaaaatgtggtggaaaatgaaaaattttttgtaatctataattatgaacattacagattataaaccataacactaacatcgccccattcattaactcgattgttaaaatcaccagttagtgaaaattgtgcaaggaataattgcctatcatgcttttatatcattattgccttactaatattaacaaaaccgatagctattacattaaatgtctatctcccacacctcaaacacatttttatacaggacgcactgtaatttcattcacgttaacgtgactcggttgtgttaatgcatacaataccgcttctgcaatatcttgtggatcaagctttttacgatcacttggattatatgcggcagttattgctgtatctaccattcctggtgaaatgcttgttactttaacacctgtctttgccaactctttttctaatccttgagtaatagtgtgaactgctgctttcgtcgcactataaatcgtactacttttcgttacttcaaagccagaaatagatgcaatgttaataagatggccacttgattgttctaacatagttggtaatgcagcctgtaccgtatataaagtgcctttgatattcacatcaatcatactatcccactcatctacttgataatcagtaatcttagacgacaacatttgccccgcactattgataacaatatccaaaccaccgaatgtttgttgtgcaatttttatcaattcatcgacttcttctttattcgttacatctgttggcactaccttcacactatcttgtgacaattgattcgctacgttttgtaatttttctttatttctacctgctaagacaactttcgccccttcttcatgtagtaatgttgcaattgcttctccaataccactacctgcacctgtaactactgctattttatctgttaatactgtcataatgatcgactcctttgattctttttattttttcagggtaaatcataaatacatattacttttaaaaagcgtatcacaattcatataacggtcataataactcgcttcattttcgtgaataaagtatattccaagccattcgaaatatacaattaatcgttgcttatattttttatttttaaaaatgttgaaaaatcgtcacttctttattgtaaaaacattatattagtactaaagttaatactgtgatttatcattcgattgaatgattagagggaggaataaaacatgacatatcatgagcgtgttttagcattaagagctgaaagtaaaagaaccgcatttgattttcgattcgaagatttatttagcaaagaagaatggctaagtatgtcgcttgcagaaagacaaaaagctgaaaaagcatttcgacacgaagttaaaaatatggacgatgtaagaatgcccttctcaagtgtccatgacgcccaagtaaaattatataatgttgtatattcttataacggcattaaacgtaattttaaacaagttgaaaatgaaggattctaatatcatttcgtttatatatagcagacatgatagaattttatatgtaaatcttgtaggtaatcgttttaaaaataatataagcatgactaaagccacatccaatataggacgtggcttttagtatcgttccagatttgtggggagttagggtttacttaattaaaggggtctgccctcaattgctcaccaacgagggcaagttacatcaatcacacttcaattgccgcagactaggggtagtaatcattggcaataagaactagttagtgactaacgatttacgttccatagcaaagtgatacaaacgctcagcatcaatgtaaggcatagaatcaatagttaggtaaccatctttgatgtcaccaattaatccttgatttacaccagtgttcacgtaaatatcatagctacttacgtctgagaaaataagcgcttcaatctcttttctcataatcatcactccaatgtttatatattatttatataaactctctcgtctctctctatttattaacttcttacaagactaatattacatgaatttccaaataaataaagggttttgtgatgtatttcacaaatttatcactattttggaaaattaagaaatatttaattatataaaagtttaataagtaagaaaatatgataaaatgtagatgttctttagacattaaaagcttctaacatgatatggaatccgaggttccgatatcacattagaagcttttttgttgcggtgcttatattaataatggcatgaatgaacgcatgctgtcttagtttcaggaatcggctagaatattaaacttccgttctttgaatattttttaatttcttactaatatcatccagttcattcttcgcctttttaccccaatctccttgagctacattatcaaattcacctttaaattttttgaaatggctacctatatttcacagctcactttagatatcgaacttgtttcttcagagttacttgttatattaccaggatttatttgatattccgtttgactcataacttgtatcctcacttggagtatattgtacagaatctgtaaaataaatgttttcttctttattttctacaaaggtaaattctagattttttgaccctacagatgagccttttaaatcaccatcacctttcaataatagtttcggagctttgttggttggaatattatatctttttcgaagttgcttcacattatagtcatcattacttaattgatactttgctgaataacttggcacattcggattatatgaaatgtcaccatctttataatcattaatatctttaaagtcaccgtattgtacaaagaatttaaagttttcgatttcttttcttaatttatcatcagctatcggtttggttggaatgattctattatgttccattttcactggatattttgtatctttactatgtgaataccctttactatcctcggttatttctctaacaacaaaattacctttcgttgttctagtattacgatttatatagagcaccattcctctagattccatattgctattatttgtctcaataatcattttagagtgaattatccaagtgcctttgtcacctttttcaaactcttcgtcacgaaagccttccttatcatagaagtcttcaagatttttggttggatataaactcaatattttgttgaaattttctttaatttgtttatctttactactttcttcttttttcattccgcaagcgcctataaaaacagatagtattatcaggcatagacacaattttaacctttttgaatgaatcatcatttctccaccttatatttttaatactgactcaatctttaatttatacatttaaagcgaaaaattttttaacactttatgaaattttcaatccaaacttctattaaccctatttagtttgactcataacttgtatcctcgcttggagtaaattcaaccgaatctgtaaaatagatattctctcttttattttgtacaaaggtaaattctaagtctttagagcctatggatgaaccttttaaatcgccatcacctttcaacaatagttctggtgcttttttagtcggtatatcatatctttttcttaattgttggatattataatcatcattacttaattgatattttgccgaataacttggtacgtttggattgtatgaaatatccccatttttataatctttaaaatctttaaagttgccatattgtacaaaaaacttgaagttttcaatttctttttttaacttctcgtcttttataggttttgttggtatgattttattatgttccatcttgacagggtattttttatctttatcatgtgtatatccttttttatctttatcatgtgtatatccttttttatctttagttatctcacctactataaaatatcctttcgttgttctagtgttacgattgatgtaaagtaccatctctctggattttaaggctcctccttttaattggatgttcattccagaattaactatccaagtacctttatcaccctttttaaattcttgatctcgaaagccttctttatcgtaaaaatcatcgagatttttggttggatataattttaatgtttgattaaatgtgtctttaatttgggcgttttgaccatttgcttttgtcataatgacataacctacaatcaatataatgagtaataccaagcatataccgagcgttaatttctttgaatgcatcatcatttctccaccttatatttttaatactgactcaatctttaatttacacaactaaaacgaaaaatcattttgaacactttatgaaattttcattccaaacttctattaaccctatttagtaggtttgaaattaatactatccgtaaaatagatgttttcttctttattttctacaaaggtaaactctaaatttttgtgtcctatagatgatccttttaaatcaccatcgccttttattaataatttaggtgctttcttagttggtatatcatacctctttctaagttgcttcacattgtagtcattgttactcaattgatattccgccgaataactaggtacattgggattatatgatatgtcaccatctttataatcattaatatctttaaagtcaccgtattgtacaaaaaacttaaagttttcgatttcttttcttaatttatcatcagctatcggtttggttgggataattcgattatgttccattttcactggatattttgtatctttactttgtgcataccctttactatcttcccacaattctctaacaataaaattacctttcgttgttctagtattacgatttatatagagcaccatacttctagattccatttttttatccttcagctcaactaccatctcagaatcaacaatccaagtccctttatctcctttttcaaactcttgatctcgaaatccttctttatcataaaaatcatcgagattcttggttggatataaactcaatgttttgttgaaattttctttaatttgtttatcttctttcataccacacgcgctaataaaaacagctaataatactaaatacagccagagcctcaacctttttgaatgaatcatcatttcacacccccatttttatttttgatgcaaagttaagttcaaattccaatattaataatactagagggaattttatgattaaatcctcttggcttttaattgttagttgtatttttcacatatcaacatcacaaattatttaaaaagcgcaaatatctttataatttttattggcctaaccaactaattaattaagataaattgcgcttatatttaaaataataacactgaaactcaatgtctttacttattaaaattgatgtttaaatacatctttactaacattcatttttcggtttacattaatttgttatatagcgatatatatcatctcttacagctttatcgagtgctaaatccatcgttactacgtttgaaccattcggcattttatcttgcttctctgaaccttctatatatccagcagttcctaaataataaaaatatataccatcatcatcttttttctgtacaaaaatatacattttaattccttttgctctatgggacaaaattttctgaacttcttttgattttagcgttctattagatttagtaaaccattttaattcatcttgacttaaaaattcatcttcatattttgtgctatcacttatatcctcatgcttatcataagtgataaatattggcatttcttggcttcttatcatgtatcccatgattacagacgaaccatttttattccaattaaatattttgctaaaatcttctcttgaatatttattatataaaatcagtccatttttacctttttggtatttttcattgttatactttgataattcaataagatcttctaaaaatattttaaatgtttgattacttagagcattagtaaatgcatcgcttagtcttatcattctttcattacattctataatgggacttccatagattttttcaattcctgcgttgtaaaatgaaaaatctaaaattcttaatgaagtatctatatcatcttctgttatatccttaacttcgttcaacattttattttttaattcatcatatgttaattcattttttaaaagttcttctaaaactaaactatcgattcttttcaatccaggtgctatttgtcttgaaaagaaaaccagatttttagattcattttccgtcaataatgtatctattttgttatatctcactaagaactcgtaataattactaaatttagaaaatataacgcttggatctatagaatgttgttgtatgaaatccattagtaacggcatgtgtcccaatctattttcaacttcttcataagcttttaatattaatttattttgatttaatgatactgcatccaatgaattgtaaatctgttttttagcaacttcttcaaaattaattgtagatactccattaatcgaatcgttattcgttaaaaacttcttataattatctttattttgcgattgatccccagaaagcgcaatcggaattaaataatttgtcttataattaccaataaaatcaattactgtaacatactctttatttgaactttttcttaatcctctaccaagttgctgaatgaatataatactagactctgttggtctcaacattacaacttgattgacttctggaatatcaataccttcgttaaaaagatctacagttataatatagttaatcttaccttcttttaatttttctattacaatttggcgataattaacactatcatctcctgttaaagcaacacttttaatcccttttgaacttagtttatccgctaaatcataagcttcttttttgctacttacaaaaattaatccttgtaaaatttcacctgaatatccatagtaatctgtcttttgaataatataattaactctttcatcagaagttaaatatctcagtttagttacatcatcttctttaataccttgatgtacataatcagtcacaccaaaataatgaaatggacataaaatatcactttctaatgctgcttgtaaccttatttcatacgcaatattataatcaaacagttcaaatatacttaattcatctgatctttctggtgttgcagtcattcccagcatgaacttaggtttgaagtagttaaatactcgttgataagtagatgcagcagaacgatgtgcttcatcaaaaacaatataatcaaattcattttcatcaaattgcttaaaattatcatctctagataatgtttgaatggttgcaaataaatatttggcatcgacatctctatgttttcctgtcaacaatccaaaatcactatcattttttataggtaatacttttttaaattcttccttagctctatttaaaatcccctcattatgaacaataaataaaaatttattagggtttacttctctaacatctaatgcacataaaatcgttttacctgtaccagttgcagatattattaacgccttatctttggctttatccctaatagcttttaatgaccttaatgcttctgcttgcattaaattgggtacaatttccactgattttttcaccttatcagctagcagcatttgagtttgttcaacctccgctaatttttctaaggagcggtactcaaatgattctttatatgatttaatccattgctgagtcagtggggtactcttttgccataacaattcaaattcattttttacactatcaactaaatcgccatttttcatagtagacagtaaaacattatgctcataattaacctttaacgcattagatgttaaattagagcttcctattaccatagaactataatccttatgttcaaaaatatatcctttggcatggaatccagcaatatcagttaatcttacctctacattttttaatttaagtaattctccatacattttaggactattaaatcctaagtaattagatgttaatattttccctttaacacccttattgcttaaatctaatagttgagcctttaagctggctaatccgctttctgttataaaagctacagaaaaatagaacgtttcacatttttgaagttcatctataattgttgaaaggactttttcatttttattatttactaaaagcttcggtgtataattccctttatgagaaatatctttgtctataaaacctttttttaaagattgattgaaatcatttagtaatctactcatattatccctcagtcataattttattaacggctggtatatccgctggggcccaatttaatttatcaagttcgtttattgacaaccattcaatactcttatgttcagttaaagttggtaactctttgtttaaagtacatttgtatgttgttaacttaacaatgccaaaatcatattcatgttctgtagttatgactttgtctccaacaattagatcacatttcatttcttctctaatttctctgatcaaagcttctttttcagtttcattcttttcaatcttaccgccaggaaattcccacattaaaggtagactcatttcttcacttctctgtgcacaaagaattttgttatcagaaaaaataatagctcctactacattgattacttttttcataagactcacccttcaatttaaaatcatcttaattgttattctatcaaaaattacaaaactatatataaatcaatattaaaaattaatattttacaatttcctgcatgatatatcactcttacatctactccatgcattttcatacacatctattatataatacttgtgaaaagtattgtcttggggctgtgtttttttacttttggggcgtatttctttataattcattacataaatgtaagggctttagttttcatgttttattaagtctaactgagattttgaaaggatgtttagcaacaatggataaagaattatggatagaacgagctaatgatagtttagttaaacatttttatgagcagcaatctgacattgaacagcgagaaggttttgaaagtaaattaacatttggtactgcgggtatacgcggaaaattcggtcttggtgaaggtcgacttaataagtttactattgaaaaattggcattaggtttagcgcgttatttaaatgcccaaacaaacagtccaacaatagtcattcattatgatattagacatctttcaactgaattcgcccaaataattgctaatgtattagcaaaccatcaaataacagtttatttacctgatacatataaaacgacaccggaattatcgttcgcggtgcgcaatcttaatactactgctggcattatgattacagcaagtcataatccgaaagactataacggcatcaaagtatatggttctgatggtgcgcaattatcgactgatgcatctgagcttgcaagtcgttatatcgaagaagttggcgatccattacagattgatatacctatttctaaacaaaatacatcttatatcaagccttttccgaaatctgtaactgatgactatatgaaacacattcaaaatatgattggctatattcctaaatctgatttacaagttgtgttcactagtttacatggtacaagtgttccgattgtacctgagttattacaatctttgaatttcaatcaatttaatcttgtagaagcacaatgtaaacctgatccgaatttcagctcagttcaaagtgctaatcctgaagatcatcgcgcttttgatcaagcagtcgaacttgcaaataaaagtcatgcagacttattaatatcaactgaccctgatgcggatcgtcttggcattgctgaacgtgatgcacatggtcatatcacatattttaatggcaaccaaattggtgcgttgttacttaattatcgtattcaacaaacgtctcaattacgtcatcgcttaatgattcaatctattgtaagtagtgagttaacaaagtcattagcacgctataataatgttgaatacaaagaggtgcttacgggctttaaatttattgctcaggaaataagacaactggacgatcatcaaaatatgattttcgcctttgaagagagttacggttttctatcagagccttttgtacgtgataaagatgccgtacaaattgtgccactcattataaaatacgcttctgagttaaaattatatggcaaaacattgaaagatgaattagaacagatttatcaaactgttggtagacatgaggatacattattctcgcatacgctagatggattagaaggtaagaaaaaaattgaatcaattatgacacatttccgttcaaatccaccgcaagagattcaaggactgaaagtgaaagcaattgaagattatttaactagcgaggtttatcatttggataaagatacaacgtcacagattaattctcctaaatcaaatgttattcgtgtcttatttgacgaaggatttatcgctttacgtccttctggtactgaacctaaaattaaattatatgtgtcgttaaaatgtcggaattttgatgatgtagctcaaaaaattaatgcgatgatttttagctaattaaaaattttatacatcgaaatattacatttcattttatacttatcagcccttttgaaactagaatccttatgttttcgcgttttgaaggggctaatttgtaataatttttcaaaagtatattagaaaattaattttcatgtatttttcatattaagcggtaataatataataattaataccgcgacctatttaattgttttcgcgatgaaaaaggtttagaattacaaaaataactattttaaatttagttacaaatatattttagaaaggatgtgaaataatgaaaggctctaaacaaatacttttgattatgggcattatatctcttattgttttatttatttttacactattcatcatggcgcaatatgcaaaacattatgaacaaaaatccgacagttccaacgcacatactttaaattcatcatcagccataattgagcaacatactatgtcgaatttagcgtctctagatttatacgctcctgttcgtaacattacttctagtcgtgatattcatcccatttatttcatgacaaaagattaaaacttcctttttcataaccccattcattcaactaataaattaaaaattgataaaaacgtactgttttttagaaacatacatatataagaaacgcatccattactaaaagacagtacattatattctatcgggaaggtgcaacaatgaccgtcaacatcgtgttttctatcgtgttctgtatcagtatggttatattaggcatttatgtcgcaataactaaagatttcacactaatctcttttataaatcaaacgaccattgcagataaacacaagaaccaaattgcatatatatttacgctatgtatcagtttgagtgcagtatttttgatgtcttcaattctaagctttgaatatgattttattgcattagcattcttatttttaacgatagcattattacttatcgcattattctacgtttgcttttataaaattacaaaatacccgtaaatgtttgtgatagtgtgttggttagatttattgatgcgctgtcagtaagtaattgtttgcgaaaaaaatacaaccttgtacgaatacaaagttgcattaatatagaatcatttatgctttttaatatcacaaaataaattgattaaactagctaaaatagtcaaaattggaatcaagattacataaatatcataacctctagatattagtatacataatataattagcgaccctattataattgctaaattataagccaaactaattttatatttcatttcaattcccaccttaatagcattgattaaaattctattatgtttacatagacttcttaacaaaccttaacccagctaagctaagcattgaaataattgcacctcctgatataaatatattacttaagcttagtaaaggtataattaaacttataagtcctaaagacaatgtatccgctgcgtaattcgatgtagatgagatactaaatactttccccatcaaatgatttggcgtctttatttgaatggcaactgatcttgttagtccctctatagattgcccaagtcccactaaagttgcacctatatatagtatcgccacacttggaaacacattaattatcgataagccaatcccccaaactaaaacaccaatactaaatttaaagattaatcgtttttctgacagtaaacccataatcaatgacattaataaagacgctatacctaaacatgatgtagctagtccatatacaccaacgccctcttttaatatattggaaataaacaatggtaatgcaacacgccaaagaccagtattaatcaatatgcaagcaaattggatgatgatgataaatggaatttctttagattttttcaagaattcccaagtttcagaaaaatcttcttttgagtgtctatcaatcatgctgatatttgtatattttaaaagtgcattaaaaataaatcctaaaaatagcaatatactgcaaataaaaaagacgccaacattaccaactagtattacaatgacaccaattaaagcaggtaaaataatatttgagcctctttgcaaactatcgattaacgcattacttgttgctaaatgctcctcatcaataatttcaggaagaattgccctaaacgcaggatccgtatagcagttaataatggtgatagctgtagatatggttagaagcgtcagataatttaaatttgatgttattgcaagtaaaggaataattattataatcaaacttagtataagatcagatagataaagtattttctttttattatgtttatcagaatatgcgccaccgaaaataccaaatataataaatggtagtgtttgactcataaccatcattgataattttaaagatgattggtttgtcaattcaacagtaaaccaaattatttgtaacgaaaacagcacaaagcaactccgacgtaagaaattaccaatcaataaatatgtaaagtttctatttttcaaaacttctaagtacaacatatttatcacctctcataaaaataattgaatgcatccaccagcttttttagaccttcttctaaactctctttatccaaagcgcaattaattctaatataatttagtcagttaaatatcaattatttcgaaatttacatactacttgaaacaccatacataacccccaaaatgactactcagaggttatattctactaattatgattatattaaatatgaaaatattatcaaaaaatcaaatttataacaaaaatacaccccttaaagttaggtctttcaatccaacttttggggtgtatatcattttcaccatattctaggttgtttttaacaaactaaatatagtgaatgcaaatcaagtattatttaaataatgaattattttaattttttcttctacgtgccaataacattaatccagcaattccaattatactactaaagatcaatcctttttgtgtgctttctgcacctgtttttggtaattctgctcgttttttctcttgattagctactgattttttagcaattttagattttttaactttatcatttttatccattgaatgaactggttcatttggttttgctctgtctttcgataatcctggattgtcaggatttactgggccacttggatgagttggtctgctcggcttctctgggttttcaggtccttttggatcttttggtttctcgccaccaaactctacaatcttatctactggttgttttgtaatctcttctgttggttgaccctcgccaactttttcacccgttaatgggttcactgtgattggtgttgtgattgtcttacttcctggttgtccttcttgtttcactcgctcttcaccaggttgtaacttcggattaaattcacgttttgtttcaaacggtatctctactgtttttgtttctggtgtacccgtttttggtccgtgtttaatcacatcatccactggctcttcgatcacttttcctgtgtctggattcttaattcctggtttacctggtactttttccgtttgatctgttggtaagtttggatcgaagatatctttatgaccttgcgttattttctcgccaccgaactctacaatcttatctactggttgttttgtaatctcttctgttggttgaccctcgccaactttttcacctgttaatgggttcactgtgattggtgttgtgattgtcttacttcccggttgtccttcttgtttcactcgctcttcaccaggttgtaacttcggattaaattcacgttttgtttcaaacggtatctctactgtttttgtttctggtgtacccgtttttggtccgtgtttaatcacatcatccactggctcttcgatcacttttcctgtgtctggattcttgattcctggtttacctggtactttttccgtttgatctgttggtaagtttggatcaaagatatctttatgaccttgcggtattttctcgccaccaaactctacaatcttatctattggttgttttgtgatctcttctgttggttgaccctcaccaactttttcacctgttaatgggttcactgtgattggtgttgtgattgtcttacttcctggttgtccctcttgtttcactcgctcttcaccaggttgtaacttcggattaaattcacgttttgtttcaaacggtatctctactgtttttgtttctggtgtgcctgtttttggtccgtgtttaatcacatcatccactggctcttcgatcacttttcctgtgtctggattcttgattcctggtttacctggtactttttccgtttgatctgttggtaagtttggatcaaagatatctttatgaccttgcggtattttctcgccaccgaactctacaatcttatctactggttgttttgtgatctcttctgttggttgaccctcgccaactttttcacccgttaatgggttcactgtgattggtgttgtgattgtcttacttcctggttgtccttcttgtttcactcgctcttcaccaggttgtaacttcggattaaattcacgttttgtttcaaacggtatctctactgtttttgtttctggtgtacccgtttttggtccgtgtttaatcacatcatccactggctcttcgatcacttttcctgtgtctggattcttgattcctggtttacctggtactttttccgtttgatctgttggtaagtttggatcaaagatatctttatgaccttgcggtattttctcgccaccaaactctacaatcttatctattggttgttttgtgatctcttctgttggttgaccctcaccaactttttcacctgttaatgggttcactgtgattggtgttgtgattgtcttacttcctggttgtccctcttgtttcactcgctcttcaccaggttgtaacttcggattaaattcacgttttgtttcaaacggtatctctactgtttttgtttctggtgtgcctgtttttggtccgtgtttaatcacatcatccactggctcttcgatcacttttcctgtgtctggattcttgattcctggtttacctggtactttttccgtttgatctgttggtaagtttggatcaaagatatctttatgaccttgcggtattttctcgccaccgaactctacaatcttatctactggttgttttgtgatctcttctgttggttgaccctcgccaactttttcacccgttaatgggttcactgtgattggtgttgtgattgtcttacttcctggttgtccttcttgtttcactcgctcttcaccaggttgtaacttcggattaaattcacgttttgtttcaaacggtatctctactgtttttgtttctggtgtacccgtttttggtccgtgtttaatcacatcatccactggctcttcgatcacttttcctgtgtctggattcttgattcctggtttacctggtactttttccgtttgatctgttggtaagtttggatcaaagatatctttatgaccttgcggtattttctcgccaccgaattctacaatcttatctactggttgttttgtgatctcttctgttggttgaccttcgccaactttttcacccgttaatgggttcactgtgattggtgttgtgattgtcttacttcctggttgtccttcttgtttcactcgctcttcaccaggttgtaacttcggattaaattcacgttttgtctcgaacggtatctctactgtttttgtttctgttttattaactagattaggcgttagtttaaatgttgagttatttaaatctgttctcatccaaccatttgcatatacaccttgagatgttccctgtctttgactagaagtaattaaaaagttatatgcttcagatttatccaatcccaaatctgatatattagcttcccaaattttaccagcatattcggctctcattatccccgatttttcattgtacgctaattttaaattattaagtaattgaccatggaattttccatctgttgtatcaatagaattatctgcatattggaatgaattatccgctttacctcttgttggtatgtttgttccaacctttgctgtagttccatcagcacctgtttttacaaacgtaccataccctttaaatccttgtcctgcctgtttctcttctttatccatgggatctttaaaattataccctgtatcaattttaaatcctgctgaattttccattcctttgggacctaatatacctcccttttgtaaatattcgttaccgtcacctttactaaataagaacccccatccatcagcgccagttgttaccgattgatgattattagctactctaatgttaaactcaaagtcatttttaaaagaaactttattctttaattgtaatgctcctgtcaattcgttttttccaatacttttattattgaaacgagtgacttcagatacctttagatcctctggattgctttgtatatcaacacttccgtaaccttcaaaatgttctttaccttgaattgtaattggggtagattcaactacatttttagaatctcttgtaatatcaaaagagccttcatcaacagaacgagcttttctaaccttaggtgtctctgcgttatgagtgactgacgatttcggctgaacttcagcaacatcagctacttcttttggtgtatcctccttttttgatatatcttcagcttttactgatggttcatgttcgattgtgtctttgtttgaagttacttcagatttagcttctacaccctgtggtgcagtgtctttgtttgttacttcttcaatcttcacttcttttgattggacattatcttttaatgtagttggattctcaatattgttttcagctgcttctgcctcttgttgagttcccaaatacattagtgagccaattaaaatagatgctgttccaactgtaaattttcttattgaatatttattcaatttatttgatagaaaatctactcttttatttaccggtcctttcttatctctcatttgcatactcctttttccatattttccactttacttacagtgaatttacatgtaattttacaaatacaataggagttgcacaatggaatataacacttatctttataaaattattttatatattgaaacacttaaaacaatctacaaataaaattattatttttagttttcaatgaataattcattcttatctgttggaaaaacccatcaactcaatagcattgaatttctaaaataaaaaataccttaacgcatttaaaaatacatttaactgcaccaagatattaaaatctcgaaacatactttatgtttcattaatatttatttcactcaaaagatttttaatataattgtgttgttttacagaaacaacaatgattacatttctactatcatgtgggtctctacatttattcaagtaacccttttttgataattcttttacgcttttaacaattctagattggtctataccgatataacttataatgtctctcataaaatatttaccttcatcatttttaaatacatctaaatatgctaatactaaataattatctaatgtaagacaaaaatatttttttaaatatttacgcagctcatatgtagttaatactcttttcattaatttaatattgctcttgcttttcaaatcattcatcaagtcttcatcccttacttttaattgtcacgtcaaataatatttgtctttaactagtaataactccaaatatatttagtttgtggtgctagctataaacacaaatgaatcataacactatattttgattttgttcaattgtttttatttttggataataaatgaatttgtcatttgttattccgtgatttttagttatttatattttatatatattatatataaaaatatttaggttaacatgtcttcaaaagagattgcttttatattactttaaataatataaagtattgggacatcagaaaatagtaggagaatgtaaggtggactatcaaactttcgaaaaggtcaataaattcataaatgtagaagcgtacatattttttctcactcaagagttaaagcaacaatataaattatcattaaaagaattgttgatattagcatatttttattacaaaaatgaacacagtatttcactaaaagaaatcattggtgacatactttacaaacaatctgatgttgtaaagaacattaagtcactatctaaaaaaggatttataaataagtctagaaacgaagcagatgaacgccgtatttttgtttcagttactccaatacaacgtaaaaagattgcttgtgttattaatgagttagataaaataattaaaggatttaataaggaaagagactacataaaatatcaatgggctccaaaatatagcaaagaattttttatactttttatgaacattatgtactcaaaagattttttaaaatatcgatttaatttaacatttcttgatttatctatcttatatgtaatatcatctcgaaaaaatgagatactaaatttaaaagatttgtttgaaagtattagatttatgtatcctcaaattgttaggtcagttaatagattaaataataaaggtatgctaatcaaagaacgatcccttgcagatgaaaggattgtgttaatcaaaataaataaaatacaatataacactattaaaagcatattcacagatacttccaagattctcaaaccaagaaaatttttcttttaaatttaaacagatttacctcttgataaaataaataagcaatcataatacttctcaatttagtataaataaaaatacataattaactttcttttgtttttatattatttcaataccctactatatatcacaacacataaattaagcatgacactcattcaatttagttcacaatttcgtgttccaattttattgagtatcatgctttttaatgttataaccctaattctttaataaatcgtgttaattcttctcgcatactgtcatctttcaatgcatattctatcgttgttttaacgaagcctaatttttctccaacgtcataacgttcgccttcgaagtcatatgcatacacttggttatcattattcatacgttcaatcgcatctgttaactgaatttcgttacctgcgccttctttttgcgtttttaaataatcgaaaatttcaggcgttaatacataacgtcccataatagctaggtttgatggtgccgtaccttgtgctggcttttcaacaaactttttcacttcatactgacgtccgtttttagttaatgggtcaataatcccataacgatgagtatctgcttccggaacttcttggacacctataactgagtgccctgtttcttcataaacgtcaatcaactgtttcactgctggcacttcagattcaacaatatcgtcacctaataataccgcaaatggttcattgccgataaattgacgcgcagaactaatcgcatgccctaaacctttttgttctttctgccttacataaaaaatattcgcaagttctgttgaatactgaactttttctagtaactcagatttacctttttcttttaacaccatttctaattctttttgactatcaaaatgatcttcaatcgcgcgtttgtggcgacctgtcactataataatatcttcaattccagctcttgcagcttcttcaacgatatattgtattgtgggtttatctaagataggaagcatttcctttggcatcgctttagttgctggtaaaaatctagtccctaaaccagcagcgggaatgattgccttttttatttttttcaaagttaatgtgctccttttcctaagtattaaatctatgtatcaacgtcattttaacactaattagaacgccttcatagtgtcattaagtatgtaattatttcttgggaaatttgatttaattttaaaaaacaggcttacttcatataatttatgaaataaacctgtcaattttagattgattatgctttgtgattctttttatttctgcgtaataatgcaaatcctaaaatactaaacaatcctccgaacagtatacctttgtttgttgattcttctccacctgtttcaggtagttcagatttcttagattgtgcttttttagttggtgccactgctttaaccttttcattgatttcaatgacaggtgttactaccttaccttgttccactggtttagaaggctttttaggttcttctttggcaggtggtactggtttaccaggttcagctggtacctctggcgttggtggtgttggtgtttccggctcacttggtacctctggtgttggcggtgttggtgtttccggctcacttggtacttctggtgtcggtggtgttggtgtttccggctcacttggtacttctggtgttggtggtgttggcggcgttgtatcttcttcaatcgtttgttgaccttcattatgaccacttacttgtggaagtgtatcttcttcaaagtcaacactattgtgtccaccgaattgataatttggtttatctttgtttgtatcttcttcaataatttcagtgtgcttattgaatccatgaatatgtggcacgctgtcgaagtcgatatcaatgatattaccaccatgttcatatttaggcttgtctttctctgtatcttcttcgaatgactgatcacctttattttgaccatgaatttgaggtacactatcgaaatcgatatctacgatattgccaccttgttcatatttaggtttatcttcttctgtgtcttcctcgaatgactggttaccgctattttggccaccttcataacctaattcactcttaatatcaacgtggctattttcttcgatttcttcaatcacaccataattcccgtgaccattttcagttcctaaaccagaatgagaaatatgatgattgttttcagtaatttcctcgattggtccttgtgcttgaccatgctcttcaggtaattcatctactagttcaatcagattactttcagtcgtatattctttcgtatcttcaactgttgtatggtcgctcactgcgccagttagaataccttttgtagactcttcgtcaaattcaactaagttagactcagttattacttggccaccacctgggtttgtatcctcttcatattcaacaacatcagcgtgatgttttgaattttcatgtgtagattcttcaaaatccacatgaatagaatcttcttcagtttcaataataccttctgcatgaccttctacaccttcaacagctgtatgatattcaaaatcaattggcttagaatcgttactttcttcgattgtaccagtcaattcatgcttctccactggcggctctgatttaatgtctaattcaattggttcactcttctcaatgataggatcatttggcttatctttaccgtcgccttgagcgttattagagtagaatgcaacgccattgtcccatgttaaacttactggataataatagtaataaccgtaattagcatgatagccatgcaaattagttctgaataataactccttgtcattttcattatatttaccttcaaaacttacaacataacttttcttatttagtgcatctaaagttaatttatagctaccgttttcacttagcgttaatttatcactcatgtcattggtaacatctttaaatttctcttgatcatttgtgttagcatagacgctttctggtaattcatcacttctcaaatactcataaactttcactgttggaacatttcctgtatacaatccacctttagcaaaaaacccatttatagttattgaggtcatatcgctttttttagggtttatataagctaaatgatgtattttactattttctttatctaataaagttatacgtccatttacagttactccccagttatctttaacaccgtctagatatttgatatcaaattcttttgaaatcttattttcacctaatttaacctcaacagtttgctttccttgcttcgtaactgtagttggatcaataaacaaatttaagtttaattcagccattaaattatttttgttatttatataatcagtaaacgtatatctaatttttctttcatccatcactttgccaacagccaaaatattatcatctttactttttatatctggaactttacgaagaggcgagataccatgagtttctacattattacttaatgtgaaatcaaagtagtcccccggtttaataccatcctcgaatttccatttatatttcaaggttactctttctgcattatgaggattaacaacatttgtctctttattgttatgccctactatttcactaccttcttctacttccactttacttgttacatctgtacctgtcgctttagcttcttccactacttctttctctgtaactgctgtaacatcagttgatcttttcattcttggtttaatttctgagacgttacttggttgagctgtgtcaacttgagttcctgtagtttccttatcagcaactttttccgatggcaaatcaactcgcgaagtttctacttttggtgcttgcacagttgttggtgcttcttctgttgttacttgtgttgattgtgatggttgctcagttgatgtcgcgctgtatgattgtgtttcatctattgtattaacgttatttgtagttgtttgtgtttcgcttgcttttctttcagtagctgaactcccactttcctctactgtagtattgttttgttccgatgctgcagcttctttttcttgtcccattccaacaacgatcattgttcctaagaatactgaggccgctcccaatttgtgttttcttatgccgtatctaagattgcttttcactataatattctcccttaaatgtaaaattcatttattttttaactcaataaatgcaattctatattgttcggtttttaaaagcaatgaaaaaaagcgagttaataaaaagttaagattgttgttaactttatgtataatgagttttttattatttgaaactcacatatatattgcatacaaagctcttgaataccttgatataacaggcttgtattttttatacttactttttaaattaaattaaaattcatctaatttaaaacaatatactaaaacatacataataatcgcctgtacaatgcatcattaacaagtcactgaaacgcctttcattgtattaataacgtcactacaatttttatatcgttcggtttttgtttggttttaatgattgtttatacagaaacagccgtatttcaagacgatattttaaatttaactaaatttgcatctagttaataattgcatttatctaatttgtcttattgattcaatctaatttgtacttacaaactagttttaaattctaactttatctctcagttcgttatcaatcatcagacataaaccaatgaagcaatcagaaaacactctaattttctattagaaatttgatttaatctaaaaaaacaggtttacttcatataatttatgaaataaacccgtcaatttttgtttaattatgctttgttattctttttatttctgcgtaataatgctaaacctagaatgctgaataatccgccgaacaacatacctttgtttgttgattcttctccacctgtttcaggtagttcagatttcttagattgtgcttttttagttggtgccactgctttaaccttttcattgatttcaataacaggtgttactactttaccttgttccactggtttagaaggctttttaggttcttcttttgcgggtggtactggtttaccaggttcagctggtacctctggtgttggcggtgttggtgtttctggctcactcggcacttctggtgtcggtggtgttggtgtttccggctcacttggtacttccggagtcggtggtgttggtgtttccggctcacttggtacttctggtgtcggtggtgttggcggcgttgtatcttcttcaatcgtttgttgaccttcattttgaccgcttacttttggaagtgtatcttcttcaaaatcaacactgttgtgtccaccgaattgataatttggtttatctttgtttgtatcttcttcaataatttcagtgtgcttattgaatccatgaatttgtggcacactgtcgaagtcgatatcaatgatattaccaccttgttcatacttaggtttgtctttctctgtatcttcttcgaatgactggttaccattattttgaccttggatttgaggtacactgtcgaaatcgatatctacgatattgccaccttgttcatatttaggtttgtcttcttctgtgtcttcctcgaatgactggttaccgctattttggccaccttcataacctaattcactcttaatatcaacatgactattttcttcgatttcttcaatcacgccataattaccgtgaccattttcagttcctaaaccagaatgagaaatatgatgattgttttcagtgatttcctcgattggaccttgagcttgaccatgttcttctggtagttcatccactagttcaatcagattactttcagtcgtatattctttcgtatcttcaattgttgtatgatcgctcactgcgccagttacaataccttttgtagactcttcgtcaaattcaactaagttagactcagtagtaacctgaccaccacctggatttgtatcctcttcatattcaacaacatcagcgtgatgttttgaattttcatgtgtcgattcttcaaagtcaattggatttgattcctcagaggactcagtgtatcctccaacgtgacccgcttcactatccacagcagtatggtaatcgatatcaatagctgatgaatccgtttcttctattgtttcaatatacccatcaacataaccaccctcaccatctatagctgtgtggtaatcaatgtcaagcggtgtattgtcttgattttcttctgtttcaataatttgcttggcatcgtactgcccgctcatagttccttttgcagtatcttctttatattcaaaatcattattttgaataatttgtccatttttaccattgccgtcagctttattgctatataaaactaaaccattatcccaagttaaacgatatcccccataaacatagtaagatttatatgctcgttctggatacccatataattcagttctaaaattaacctgatctgacccttgcaaatattcacctgtataatgaatgacatacgttttatccaacttatctaaattcaatgagtaactaccattgtcttgcacactcaattttccattcatttcctttgttacatctttgaatttgttagtatctgatgtatttgcataaacactttgtggcaattcatcttttttccctagatattcatatactttaacagtaggttgtccaccagctaaattactaccttcagtcaacgtccctgttactgatacagtgtttgactggtttccattcattggcttaatataagctatatgtgtaaatttattagattctttattaaatgtttcaattgatccatttacatttgtataactattgctaacacctggattataaacaactggtattgttttttctgtttcttcaccatttaatttagaagtaatcttttgttctccattgctttgtacagttttagggtcaataaataagttgatttctaaattagctgttacctctaccttgtgttcaatttcgttagtaaatgtatatcttatgttaccattccctaagatctcacctgtagccattacaactgagccatttttaatctctggtacctttctagctgttgaaaccccataagtatttacattatttgataatgtaaaatcaaaataatctcctctttttaatccatctgcgaatttcaatttgtatttcaatacgacacgttgaccagcatgtggctctactttatttccttgaggtgcctcaatagaaccactttctactgtaactttacttgtcacatctgtacccgtttccactttctcgtcactagcttccttagcttcaactacgtctgctgatcttgtcacacgtggtttactttctgatgccgttcttggctgtgccacttcaacttgtgtttctgcgacttgattttgtgtggcctttttaggtgttaaatctacttgtctttgatctccgctattgtcttgagattgtgttgtttccttaacttgaggtttcgcttcttccttaactacctcttctttaactgtttctaaatttgctggttgtgcagtttgtggtgcttgtactgcttttggtgcttcttcagttgttacttgtgttgcgtttgacggttgttctgttgctgttgcgctgtatgattgtgtttcatctatagtattaacgttagttgtagttgtttgtgtttcgtttactttattttcagtagctgaattcccattttcttctactgtagttgtcttttgttctgatgctgcagcttctttatcttgtcccatcccaacaacgatcattgttcctaagaatactgatgctgctcccaatttatgttttctaatgccgtacctaagattgtttttcactataatatctccctttaaatgcaaaattcattaatttttttaaacttaataaatgcaagtctatattgttcggtttttaaaagcaatacaaaaaagcgagttaatgaaaagttaagattgtcattaattttatgttaattgataattttattatttgaaatatacctataaattgtattcaagtcatcataaacccttgtcacacaaggcttgtattttttatacttatttttcaaattaaattcatcattatctaatttaaaacaatatactaagtgtttcataattatcgcctgtacaatacgcacaaaaacatgtcttgaaacgcctttcattacactaaaatccccaatatactttttatatcgttcggattatgactatttcagacgattttctgcataaaaataaacgtgtttcaaggcaatatattgcaattaccttaaaacacgtttacttaatatttagttaaacaaataagctgatgaatagaatgaagatgatacctgaaacggaaataatcgtttctaataatgaccatgttaagaatgtttcttttacagttaaaccaaaatattctttaaacatccaaaatcctgcgtcatttacatgagacaaaatcacactacctgcacctatcgcaagtacaactaatgcaacatttacatctgatgattgtaataatggtaagacaatacctgtagttgaaatcgcagctactgtagccgaacctaatgcgatacgtagcacagctgcaacaatccatgctagtaaaattggagacatctctgtaccttcaaacattttagcaattgtatttccgacaccaccgtcaattaatacttgtttaaatgtaccgccaccgccaataatcaataacatcattccgattggataaatcgcattcgtcactgattccataatatgattcatcttacgttttctcattaatcccatcgtaacgattgcaaataatactgctattagcatggctgtccctgctgttcctatcatataaatgatagattcaaatagatttgtaggtttgtcgtgcccagttacaagttgcgttatcgtagacactaacattaatatgactggtaatgttgcagttaataaactcataccaaatcctggcatctcttgatccgtaaattctttttgtgcacctaacgctgaaatatcgccttctcgtgtatacgcagacggaatcattttttgtgcaactttgttaaatataggtcctgcaatgagtgtaactggaatggcaataatcataccgtacagtaatacatctccaacatttgcctttaattcttttgcgatgactaccggtcctggatgtggtggtaaaaagccatgtgtcacagataaagctgttaccataggtagtcctagttttaacactgaaacatttgcgcgttttgctactgtaaatactaatggaatcagtaagactaaacctacttcaaagaacaatgcaataccgacgataaatgctgcaacaagcattgcccattgtacatgtttttgaccaaatttttgaatcaacgtgtctgcaattcgagttgcaccaccaccatcagcaagtaatttcccaagtatggcacctaaaccgaatattagtgcaatgtggccgagcgtactgcccatccctttctcaatcgtctccataattttagtcaatggtatacctagcattaacgctgtaatcatcgatgtgataattaatgaaataaatgtatttaatttaaacccaataattaatactaataaaataacgatacctaaaacaacactgattaacggccatatttcgttaaacatgacattcccctctttctcttttcaatagaatgtaacaccgtcgtcgcgcacgtattccacataatatatagtagtcatggcacaacaactttatctaagatgcttaagtgacgtatttattgtgttttattttcagccatatgttggcgttgaaaatctgcaatttgttcataattctctgttaaagaacgacttaaattgataaaaatggatacgagctcttggtaaacagcgacattttcttcaaacggcatatgattatttgtagcaccgaccatcgatgaaacgattgaaaaatcttcaatgtcacctacagctttaagtccaagcacgcaggcacctaagcatgaactttcatagctttcaggaaccactaactctgtgtcaaatatatctgacatcatttgacgccatacttcacttttcgcaaaaccacctgttgcttttatcatcttaggcgtttcattcattacttcaatgagtgcaaggtagacggtatacaaattgtaaagaacaccttctaatgcagcgcgaatcatatgttcttttttatgagataaagttaaaccgaagaatgaacctcttgcatttgcgttccaaagcggcgcacgttctccagctaaatagggatggaatattaaaccatctgcacctggtttaacacgctttgcaatttgagttaagacatcataaggatcaacaccgagacgtttcgcagtttcgacttcactcgctagcaactcgtcgcgcaaccatctcaatacgacaccaccattatttacaggacctccgatgacgtagtggtcctctgttaagacataacaaaatattctacctttgtaatcagtacgcggtttatctatcacagtacgaatcgccccagatgtaccgattgtgacagcaacttctcctttaccaacgctattgacacccaaattagaaaggaccccatcactcgcaccaataacaaacggtgtatcttcattaagccccattaatgttgcataacgttctttcatgcctttcattacgtacgttgttggcactaattccggcaacatttccttggaaataccaagcaattctaatgccccaacatcccaatctaatgtttctaaattaaacatccctgttgcggaagccattgaataatcaatgatatatgtatcaaataaatgatagaaaatgtatgttttaatatctgcaaacttagcagtacgttgaaatacatcttgccattcatgtttcatccaaaaaattttcactaaaggcgacataggatgaataggcgtacctgttcgctgataaatcgcattgccatcatgcacttcatttattactgttgcatattttgcagcgcggttatctgcccaagtaatattatttgttaatctttgatgtttctgatccatcgcaatcaagctatgcatttgcgcactaaatgacacaaatttaatatcatctttattaactttggattctctcataacatatttaatagtcattaataccgcatcaaataattcatctgggttttcttctgagacatcaacgtttggtgtgtgtaaatcatagccgatttgatgtttcatgatgaatgttccattttcatcatataagactgacttggtactcgtcgttccaatgtcgacaccaatcatatatttcatgacaaatccttctttctttcattttaattcaaccaaaatccttcaatatctttaccaacatcgtcgaaatttaagtgaaacgcttctttcaaaatttgactgtcgtattgttccactgcatcaataaacacttgatgattatgatgtatgcgttcaaaatcttgcgggttctgttgcatacgttgtcgcatggatgttaaaacgagtgccatcattactggttttaaatgactccaaaatgagtttaaatattgatgattagatgctttgattaatgtttcatgaaattcaaagtcatgcttcgtaaatgattctgcatcctcaaattttactgccactttcatcatttcaagttgtttcttcatttcttttacgataggtagtcgctcttgatttttaactcttgaaaatgcaaaagactctagcatcagtcgcaaatcgtacatttctttcttttcttgttccccaaacggcaacacatgtgcacccattctttctaattggatgagttgattttgttgcaataatttaaatgcatctcgaattggcgaacgactcacattaaattgctttgccatttgattttcagtgagtaacgtaccttcagctatgtgaccattcacaatacctaagcgtaattctgccgcgataccttctccagttgtcataccttccaaccatttctctggatatccatacatcatcaaagccactccttcattacacgacatacttgtatacaagtatgttaatatagttcttaatcgtttgcaagcgctttctttacgcgtactaaaatagtgaccatcccttttcaatgtaaatttaaagggaatggtcactatcacacgaatgatttaattgttatgttgtatgtgggatatttctaattgttctgtactcatatgcgctttaggtacttcaatgcaataatgcgtttcatgacagtttggacattcgaatcgacgtgttgtagcagtatgtttcgctttgataacttgccataaagatggtgagaatatatgctggcagttaggacataaataggcaaccttttgttggtaataaaaagtaacaccaatgccgtatccaatcataaacggcaacgcaattagaaacggccatttatttttcatcaaaattgcacttataatgctagaatattgaattattcctataatacccgcactaatccaaatgttacgacgaatacttttcatttcagctgatttactcatgacatgctctatgtcttttaaatgtgtgattggagacgtcgacgctttatttacgtaatattgaacatttttaattttgtttaataccgcttgttgctgtttgacttgttgattaatttcttgttgtttcatagttagtaaagtattgagtgtcttcaaagtaccttcaccttttagcaacatatctatatcgcttaacgcacaacctaaatctttaagcaataagattaactctaatgtttgtcgctgttgttctgtatacacacgacgctttccttctgtaaatccttgtggtttcaaaatacctttgcgatcataatattgaatcgttcgcgttgtcacattgcataatttcgcgagttctccagtcgaatagttagacatagattccacctcctacaatcaccatagttgatgacccgacgtcacgagcaagtactttttctacattttaaagaaatttattatactaggcgtcttatttttgtgatttcgtaccatgttgatttacaaaatcactcaaattaagcaacactactactaaacgtctactctgttatttcagaatgaatttgttgtaatttatcttcaacttcagtaatctctgtcgcacattctttcagtaaatctcgatacttttccgtctctgcattgtttttataacgtattttatgttctaaacttgcccacatatccatacctatcgttctaatttgaatttcaacaggcaatacctcaacgcgttctgctaaaaagactggaatggatacaacgatatgtaaactgcggtaaccattttctttagggtgctgaatataatctttacgttttatcaattgtacgtcttcttgtttaagcaacatctcttcaatcaaataaatatcatctaagtaattacatactacgcgaattccggcaatatccagtatatgttctttggcagtttctgcgctaatctgtaatcctttacgattaagcttttctattaaactgcgcatttctttcacacgtcgctccatatgatgtatagggttgtgtttataaatgtgattgaaattatcgtctaaaatactcagtttagtgcttatttcctttagtgctgacgaataaatatgatctaactctacgaaacctaataacgtatcaaatgcttcatcaccattttcaaatttacttaaactatttttaaaatcatgtcgcaaatcctctaaatatagtgatggttttcgatctacatacatttttatactaacctccgatatataatcatctttattgtacctaacattttattaagataatactaatacactatcgaactttgggctgatactgaaacagcacaaagaaactcaaacaattcgaattatgtatcaaaaccttcaattataggaagtaattttaaaatgatttaacgcaaaaaaacacctgttaccgttatataggtacaagtgtttaattgatagagatgttatacgtctttaaatgattccacaacttttggatgtggaccatccataagcggttctctttgtcgaacgccaccactttggttgccaattgattcgctatcaaagtacgatttatcttgatttgattgttcttgaatatgttcttcattatcagttgttgcatattcactatccacctctgttttttccattgttgctgtatggaattgtacgaagttctcttcttctaatgctttgatttcttctttcgataacgctcgataccaatctttcgcttttttcgccgcaataggaacaacatctttttcaagatatccttcttttaacattgcattcgcaatttctatcgctttttgccgtttaattacttcaaaatctttccatttttcggggtaacctttcattgtaaagggcatttccttaacctccaatatgttataattcatgttatataccaccataattataaaatgaaacatattaaacacaattttttagactcccgtcataataacttcagacaaacgttagtctgacctgataaatattttattttaaacgttcttgtctctctcacaaaaactattgtgttgaatattcatcattgctgattgaatataattatactgtggtaaatctggtaatatctttatttctaattctgtatttaattctaaatgcttagcgatgttttcaaatgttgctaaatactcgcccattaattgttcatttattgtaagtctatcttcattagccatggctctatttaacataaagctaatttcttctaatgcgaataagctaggataataattttgaatcaatgtcttatcactaaataattcaccattagctgcattataaacttgcgtcatgttatttaatttcacagataggttcatagccgtgtttttctgatacacatcatctttatattggttttcagaaaacaaataatggaagagcgttgcttctttacgaacaacttcagccattacattaggaagcaatgcggatgcggtacgttgtccaaggacaaataaacctatgattgcaatcacaatacccattgcaacgtcaataactcttggaaacgcaatgttaattgttaaattctgtgatgctaatccattcattaaaataacttgtattgtaataaaaactactgcaatcgcataatttgctcccaccaatgcttcagtaaacaatgctgcaatgcccattaaaattactgcaacaggtgttggtattgaaaacaacaatatgactgaaagtactaacacacctaaaatagtacctaaacctcgtgccatacctctctcgattgcatgtatagttgatgttcctagtaatattgtatgtgcagataacggtatccagtatgctttttcaaaatcaaacattaacgcaataaatatcgctatcatcataatcgctgtatatctcaatgtatttctaaaaacaatagagtctaatgttaaattttgataaatgcgtttactatataaaggttttcgcatgtctgcttcatacgcaatacgcgcttcatttgcatgcaccatttcatcaattttcattatatggttgaataaattttgaaattcctctgttactgtcacttcttttcgccaatatcttacattttcctcactattatctagttgtgcaatgatatgatccatcatttcaattaactcatctggcaatggtcgaatttgtttagcgttcaactctaacagttcagaataaatcccttgggcagatgtgtgtaataataataatttttggaaacgtctacttaatttatcgttacttgaagtagaagtgattaataatttatcagatgctttaaaattatccaccgctgtttttgctacttgtaaaaatgcagatttatcattataagtgtgtaacaacttagatatgagtttaaaatcattttgaattgcttgttcttcagctttgtttttagaaaatacgatcgtgattaacaccatcatagtggcaagtataccgcctactaaaatcgcaaagcctctatataatgcttcttcgggagctataggtaagttaatgggtagactgaatgtcacaatgaagaatgtcgatgacggtccagctatttttaaggcagtaaatatataaaatggtataaccgtaacaattaataatgtcattccaaaaacgagtggcgttttggctgttagcgtaccaagcatcatacatattgcaaacgctaaattacaaattattacagttcgcagcttagatcgcgacggacctttaaaaacataaatatgggctagtgttccggttgcaactaataatccaaattggaaattaccacataagtaaccgattattgcgggaataatcattaacagtccctgtcttacacctttataaaagtctaagttaagtcgattgatttttatgagtgatgtcaaaaagatgtcatttcgacttctcctttccttgtcaaaatatttccataatctttttattagcatagttaaaatgaatttgttgctataaattttaattacgcaacatatgtcattataacaccttatactcaattatctaaattcaaaaacttttaaagtccaattaaaattattttctaatgttatttaacatcgttgaacctttggtcgcccacctttgcgctagttaagatttatttgtgacatgttgaaattattttagtgaatacgatatttagggttagaaaaacattcacatagacttaaggtttatttacttcatattattcctagggttcatgatccaaactatagtgaatttaaaaaagtttataaaacatatttgcctcataagcttgaatagttcctatattcgttatttaaaatgacattcgatgtcagttcatttcttaaaatatcgaaagatgattacgtataatatatatagtgacgtatttacaaataatggcagtaagcagtacaaaatgattacacaaaaatttccttctactcgataaattaagaagtataaaataattaaaaaaatacttataatcagacctataagaggcaaacttctaatatatttctctaagttttccttcatatgtataacctcctaaaatttatatgtacttttacaagcgttacctgactaatgttttaaaactttatttctttacatatatcattttaataacttcccgttcatcttaaaccatatctgttttaaaaagtttcaatttcaacgtaaaaaagcaataagccccaacaatgtgaaagcttactgcttgtttaaattatttttctattgctttatcatcactaacaattaaaggttgatctggtttcacatagaaccacataatcacagcgattactgctggaacgattaacaattggaatgtcattgtccaacctaaatgttctacgaatagacctgctaatagcggactgattaatgcacctatattaccccataagttcatccaccctgatactgtaccagagaagttacgtcctaagtcagttgctgcagcccaactcatacccattgaaataccgataccaccaagacctagtgataaccagaaaatacttacatataaatttcctgtacgtacagcaaagataattgaaactgcaaacacaataaatcctgcgattgcaattacacctctagctacgaattttgaacgacctaatcctaatacacggtcagaaattgcacctgctgataagattaagaagaacattaataaccaaggtaatgaactaatgctcatttctttaaagttaacgtggaatacttctgttaaatacgtcggtaaccaaattaagaataatgtaatgataaattgtacaacaaagtattgaattgcaattgcatagaagctaaaacgtttaaagaaatcattccatggtggtgatgacttttcagtagctacgatatcacgattttccataatgaaacgtttctccgcttcattaaccattctatgttgctcaggtaagtctttggcaataatcgcccataatacagccattaaaatacctactgcaccaaaaatgtaaaatactgcttgccagttaaatgcgttaacaatagcaattgtaactattggtgctaatacaggtccgaaatatgatcctgctaataatgcacttgatgctctacctttttcatttttagagaaccaaaatgagttaaacacagcattagaagggtacattggcgcctcacctacaccaaataagaatctcactaaataaattaaaccgtggttcttaatcatacccgttaagattgtaaatgcactccaccaaactaatgcaattgtaatcatcttacgtggaccgaatttttcagccaacatccccgatggtacttgcattaatgcataacctagagagaagaatgatgccaataagccaaattgtggtttggtcatccctaaatcatccatcatttgtttagcgatatatgaaatgtttgctctatccatatacgcaataaccccaataaagaagaacgcaagcgcgaacatccaccttacgttagttcgtttttccttcataactattcctacttcccttattaatttttaaaaacttaccctagaacgataaaactttcggacatctggcatgtccacccctactttgtcacaaaattgtaccaaagttattttttataatattatcaggcatggaaagcgtttacaatagaatctataaaaattttattaaattccgcttaacttttgctattaaaacgatataaaggaacttttagttacatagtagcctatcatttgttaattaaaaatactgcaatcctagtgttttaaaacgtatattgcaggctttcttacatattagacattcattttaaattgcataaaactacattgctcattcattgtgcagcgcctgttatttagatgatcatttgttgacttttcgtacttatagcaagcaattttttgatttattgcttataatacattttaagacaaatgcttgtttcaacatcgcatacgacatcattcattattcatttgaatttatccagtttctatttgtctgcaattgctgaaaattaaaggagcttatttttaataatggaacaaattatcactgaatttattagtcgttttgggtatgcagccatttttatattaattttattagaaaatgttttacctatcgtaccatcggaaattattctgacatttgctggccttatgtctgttaaatcacatttatcaattttaaccttatttattattgcaaccatcgcatcgtttatagggctgttaattttatattatatctgtcgtttaatttcagaagaacgtctatatcgctttattgatcgacacggtaagtggattaaattgaaaagtaaggatttaaagcgagcaaatgattggtttaaaaagtatggcgtatgggctgtatttatctgtcgtttcatacctgtattacgtgtattgattaccattccagccggtgtaaaccgcatgaatgttgtgacatttaccgttatttcattaataggtacaacaatttggaatttcggtttaattttactaggacgcacgttgagcgatagctttggtatgttgatgactggtcttcatacatattcacgtattatgtatgttgtcatcattatcgcagtcatttactttgctatacgttacattggcaaacgtaagagagtaaaataatattgttgttagtataatggtatattttcaattgctataaataaaaagcagtaaaatcatttcgatggctggaatgatttactgcttttttaggtttatttggcatactttagttgaaagtcatctaaaaccctttacgttaagagatataatgaagtttcccataaaagttcagttccctcagtatgtaccatttattccgcaaacgcatctcacaatccatctataatacaaactatcatcttaaataagcagaatttaccctgtcttccacacaaactgttttcgtcactttaatatgccttctattcaaaaaagtcactcataacaaattgcgcattttaataaatgtagcaatgccatttgcatgctacaaaaatactcgtattcatatttatcttttatattattaaagttttttaaatccgtatttttataacacttgctatgtgataaaattaattttatatataaaatcttaagattcagattatttaatagcaaaggagatagtgatatggatgttttaacaatagaacatttaacaaagaagataggcaacaaaacgattctcgaagatgtatcatttaagctgaaacgcggacaaatagttggtctcgttggagcgaatggtgcaggtaaaacaactttaatgaaagttatattaggttactctagtttccaaagcgggaattttaatgttattaacagcaaagacagcaaaagcaatatcggtgcattgattgaaaatccaggaatatatccttttatgtctggatatgaaaacttgaagttattgaatgaatcaaaaaacactcaagatatcgataaaattgtctcacaacttcatatggatgaatacattcataaaaaagctaaaacgtattctcttggtatgaaacaaaaattaggaattgctatagcatttttaaatgaacctcaatttattatcttagatgaaccaatgaatggcttagatccaaaagctgtgcgagatgttcgtgaattgattgtccaaaaagcgcaagaaggtgttactttcttaatttcgagtcatattttaagtgaattagttaaaatcacaaactctatccttattattaacaaaggtaaaattgttacagaaacatcggaagaagaacttaaacaatttaaagataatgatttagaaaatgtattactagaaatcatagaaagggaggaccaagcataaaatgggaactttaattaaacaagaatgtttcaaattatttaaaaagaaatcaacttttatcgcacctattgtctttattctactaatggttgctcaaggttatattgctacaaaatacaataaaatttttacgccacaggaatctttcacatctgcttataatggtttttcatggtttgcatttttattaattattcaagcaagtacaatcatttcaatggaatttcattacggtacgattaaaaatttactctatcgtgaatattcaagaacaactatgattgttagcaaaatcatcacattatttattatttctttaatttattttgttattacaattattgcttcaattgttattgggtctttattctttaatgatttaaatatatttgaaagtagcggtaatcaattatctttattgaatcaattattattagttagtttaggcacatttgttggcgtttggttagttttaagcttaacgttgctattatcatctgcaacaaattcaacgggagtagccattgctgtaggtattgttttttattttgcaagttctattttagcagttattcaaacggcacttttagaaaaaatagactggctaaagtggaatcctattaatatgatgaatattatgcttcaaacagttgaaaaaggctttagtaagtcgacgaaattagaacttcatgaattgtttattggtaatattgcttatatttctattttcttaatacttgtagtatttattttcaagaagaaaaatatttagtaacttcaagttattaaatgtctaaatacacacatattccatcgtaattcaaaatcattttcaaatcccttcacccaaataatggtgcggggatttttttatccaaattttggcaattccacattttacatatcgtaattttttaggaaactagtgaatataacaaattcctcctctcatttttaaaataaatatatcactttcccacttttacttaactaaactgcaacgactcctaataccaaaatcctgccctctatttttatcaatccaagcatacttattgaaaaatgttaacgttttcttgataatcattgtaagcgcatttattttataaactaacgtttgaaatatactacaggagtgacacgtaatgactcaaattactgaaaaagaattaaaaaagaagtatttagatttactatcccaaaattttgatactccagaaaaacttgcaactgaaattatcaatttagaatcaattttagaattacctaaaggtacggaacatttcgtcagcgatttacatggtgaatacgaagctttccaacacgtattacgcaacggttctgggaatgtgcgagcgaaaatcaatgatattttcaaagagagactttcaactaaggagcttaatgatttaactgctcttgtctactatccagaagacaaattaaaattgattaaaagtgatttccaaagttgcggtcaacttaatgtctggtatatcacaacaatcgaacatttaattgagttgattaaatattgttcttcaaaatatacgcgttcaaaactgcgtaaagcattgccaaaacaatacgtttatattattgaggaactactgtataaaagtaatgaatatcaaaataaaaaatcatattacgaaacacttgttaaccaagtaattgaacttaaacaggcagatgatttaattattggactcgcttattccgtacaacgcttagtcgtcgatcatttacacgttgtcggtgatatttatgatcgtggaccacaaccagataaaattatggatacactgattaattatcattccctagatattcaatggggtaatcatgatgtgctttgggttggagcctatgctgggtcaaaagtatgcttagcaaacttacttcgaatttgtgcacgctatgataatttagatattatcgaagacgcttatggcattaatttaagaccactgcttactttagctgaaaaatactatgacgcagataatcctgcttttaagcctaaaaaaagacctgacaaacacgaacgtttaactcaacgtgaagaaagtcaaattactaaaattcatcaagctattgcgatgattcaattcaagttagaaataccaattattaaacgtcgtccaaatttcgaaatggaagaacgtcttgtgcttgaaaaggttaattatgatacaaatgaaattacagtttatggtaatacatacccattgaaagacacatgtttccaaactgtcaatcgtgataatccagcagaattactacctgaagaagaagaagtcatgaataaactattattgtcattccaacaatctgaaaaattacgtcgtcatatgtctttcttgatgcgtaaaggctctctttacttaccatataatggcaatttactcattcatggttgtattccagttgatgaaaatggtgagatggaatcatttgaaattgatggtcatacttacagcggccaagaattattagatgtatttgagtatcatgtccgtaaatcatttgatgaaaaagaaaatactgatgacttatcgacggatttagtttggtatttatggactgggaaatattcgtcattatttggaaaacgtgccatgactacgtttgaacgatactttattgcagataaagcttctcataaagaagaaaaaaatccatactatcatctacgtgaagatgtgaatatggttcgtaaaatgctcagtgattttggattaaatgcagatgaaggtcgcattattaatggtcacacaccagtgaaagaaatcaatggcgaagatcctatcaaggctgatggaaagatgcttgtcattgatggtggcttttcaaaagcttatcagtcaacaactggcattgcaggctatacactattgtataattcattcggtatgcaactcgttgcacaccaacaatttaacgctaaagaaaaaatactttccgaaggtatcgatgaactttctataaagcgcgtcgtagataaagaattacaacgtaagaagattcgtgataccaatattggtaaagatcttcaagctcaaatagatattttgaaaatgttaatgcatgatcgctacttagactaaagacgacattttatgcatgtattgtatactgttgtattgatgcggtttacgcattggctacgcaaacgcgatgataaataggcgacctagctacaccgaaaaaaatcccctcactattgcgagtagtgaggggattggtgtatctatgctaattcctgttaactgtattataacaactttacagcaaaaaaatgcaaaatcaactaataaattaatgaaatgaccgacgccctcgcttctacttcaatttaacaaaatactatattagtactatatttttcattaacatgtatgttacattttctatattacttaaaattacgaagggacatttttaaatcatgcgtatcttaaaagagtccattattgtggcatttgcctttgttggtgttgtcgttggtgccggctttgctactggtcaagaaattttccagtttttcacaagtcatggcgcatatagcatttcaggcattattgtaacaggactattgattactttaggtggaatggttgtcatgcatacaggtcatcatctaaagtccagaaatcattctgattcaattaactatttcttatacccctctattgcaagaggttttgatattattttgacaatgtttatgttgtctttagctattattatgactgcaggtggtgcgtcaaccattcatcaaagtttcaacttaccgtattggctgagcgcactcatattagtcgcctttattttagcaacactgtttctaaaattcgatcgtttaattgctgtgcttggcggtgttaccccatttttaattgcgattgtcattatgattgcggtctactatttcacaacaagtcatcttgattttactgccgctaataatgatgctcagattcataagcagaaatcattatcacctggatggtggtttgatgcgattaactatgcaagcttgcaaattgctgctgccttcagcttcttatcagtgatgggtagtaaagttaaatatcgtgactcaacgttatacgggggcttgattggcggtttaatcattacatttttactcatgatgattaacctaggtttaatttctcaattcgataaaattaaacacgtcgatctacctacattaaaattagcgacacaaatgtctccgtcaattggtattattatgtctgtcattatgatacttgtcatctacaatactgttgttggattaatgtatgcatttgcgtcacgtttcagcgttccatttagcagacgttacttcatcattattattacaatggctgtcatcacttatattagtacatttatcggtttcatttcattaattggaaaagtattccctattatgggattgttcggtttcatcttactcatacctgtactctataaaggtttaattaagcgtattaccggcaaatctcatatcgattaaaatatctatactattgtaaaatttagtacaacacttcaaaatcaaaaaagcgggcagatgaaaagtaaaaatcttttccatctgtccgcttcttaatagaactgttatttcccaagtatttgttgaccagccgttaatccagtttctgtaatttcatgaccattcacccaaacttcttcgactactgccccacgtgtcttaaacaagttaatgacttgttcacttgcagctaatggcacaattggatcatgtttccccatagaaagcaacacacttacatctgataaatcctttgttgacgttacttcaactgggtataacggtgcatataacaatgcttttttaaatggtgcttccgaacgcaacattaagttaatcgctatatttgatccatttgaaaatccaacaagtactgctttttcaatatcaaattcataacgttcagcagcttctttaatgaacgctaacaattcttgtccacgaaattccaaatcttcttcatcataaacaccttcaccaagacgtttgaaataccggttcatcccattttctgaaacttgtcctctaatacttaacaagtgataattttcattcaatgcttcgcctaatggcaataaatcgaattcatcgccacctgtaccatgcaacaatattagcgttggcgcacctttttgtccttcacgaaaaatatgttccatcacaaatcctcctcattccaattaatcatgttaacgcttagtattaaatggtcttatttctgattctatatactctcttttattttctaaaaatggtggcaatgataaaccttcacctaatgtttcatacggttcatcttccataaatcctggtccatctgttgaaatttctattaaaatatgccccacacgtgcatataatgcttcaaaatagaaacgattaacgatgcctgagttgttaatacctacctctttatatttcgttgcccacgcttctattgcatcatgatctttcacacgaaatgacacatgatgtacctcaccataaccttgacgtgctgctggccctttatcatcttttattaagattacctggccaccattgcctccttcgccaacttcaagtaatgcgacattatcttcatgcgcaatagttgtcataccgtaaacagtctctaaaatatttttaaagtcgtcaaaataacttactttaatttcaatgggtcctaatccataaatcgctttatctactggaaccggtccattcttccaaggtacaccaggtgctaccccttcatttaactcatctgaaattaattgatacacttggccatcgacttcttcaaatggcaacacttttttaccaaataattcttgaataccttcgtgtttaacaccaaattcatcaaagcgctgttcataatacattaatgcgtcatcgttaggcactctaaaagacggtcttgtaatggaatttgttcctgcctgcccttttgtaatatttggaaaatcaaagaacgtcatgtctgtacctgccgaacctacatcatctgcaaaaaaagtatgatacgtataaatatcatcttgattgactgtctttttaactaaacgcatgcctagtacttctgtaaaaaatttataattacgttctgcatcatctgtcattgctgtaacatggtgaatacctaatagttcatgattatttgccattttatataccctctttgtcttttagcatatttatctcgaaaccgagatattttaatgtaaatttttagtgcacgccttacacttctgtagattgtgcacttaatttcttaaacgcttgttgtaagattgttaattcatcctttgttaacacatcaaacgcttttgttaatgtctcagcatgcttagggaaaatatctgccatttgactttgacctttttcagttaaacaagccatatatacacgtttatcatctttatccttttcacgtgtaatccaacctttgtcctctaattgacttacaacatatgaaatgctgctacttgcaattaatacgcggtctctaatacgttgaattggttgcggacctttattataaagcaactcgagcactgcaaattcagtaatatttaagccatatcgctttacgtcttcttttgtaatttgctctaatgtgtctaacgccctattcattccgacaaagacattgagcgattgtttcgttcgatccatatcatcaccaactttttaatttatttcgatttcgagataaattatatagctaaatgaatttaatgtcaagatacgtgttttcatcttcatttcaaactgcgcttaataaaaacgactacataaatgtggcaatgtcgtcacatgactgtcatgcacctttgacttcgtttaagttaaaatagaatagggaaatactataatcaatcatgataggagttgatatgtatgagtaaccttgaaattaaacaaggcgagaacaaattctatattggtgatgatgaaaatcatgctttagctgaaatcacataccgttttgtggataataatgaaattaacattgatcatacaggcgtatctgatgaactcggtggtcaaggtgttggcaaaaaactagttaaagcagttgttgaacatgctcgcgaaaatcatttaaaaatcattgcctcgtgttcatttgccaaacatatgttagaaaaagaagattcatatcaagatgtatatcttggttaaataaattttgcgatggtgcaactgtgccatcgctttttatttgtacgaatcaatataaaattgcaaaacgacaagttattttgcatttcaaactttatgctatcaattcattttcttttctggtatactttttatactaacttatagaaaaatagaaaacgaggcgatgcataatggcatttcacgataaaacagcaacacaagtgacaaacattgaactgaacgtaagagacttagacttaatgacaacattttacaaaaacattttaggactatccgttaaaagttctgacgataacacaaccgtattatctgttgggactggtggccatactctaacgttacatttattagaagacggccgtcagacttccccacgtgaagcagggctttttcatatagcacttttattaccaactactgaggatctagctaacttcttatatttcgtggcacaaaaaacatgggcatcggcgctggtgatcatttagtaagtgaagctttatatttcaacgaccccgaaggtaatggtattgaagtctatcgcgatagaccttcatcttcatgggaatggcaaaatggcaaagtaaaaatggatactttagaagttgatagccaaactttattaacacatcgtactgacgaaggttggcaaggaatgccagcaaaaggcatgattggacacttacatttaaaaacacatgatttggacgcagcatatcaatgttacattgaacaattaggattccaacatgtgtctgattttccacgtgcgttatttatgtcaacgaatcattatcaccatcatattgcggctaacacttggcaatccaatcaagcaagacaaaacaatgcacaaagttatggattaacacatgttgatatttatcaacccgacgcctcaacacatacatttacggcaccagaagggtttgacatcacagttcattcaaatactgaccttgttccagaaaaataatcatccatactttattaatacaattttttcacgcaaaagcccgcgattcatttatatgaacgcaggcttttattattgctaactttttaattatatatatttagacatgctgtattctatttattcttttggtccaacccattcaataacatcttcatatgcttggcgtgttttatttttcggtggatcttgttgtctgtagccaaatgcaaccatcactgataaaccaaattgctcagtatctaagatacctttatttgctaaaatgtctgtcactgtatccagactaaaaccttccatcggacatgaatcaatacctaacaatgcggctgtcgtcatcatattgcctaatgcgatatacgtttgtttacttgaccagtcatacaaggcttgatcattatcagaaatatggaaatctgcttggaatgcatcgaatttttgttcaacagctgggatcgtttgtgcctcatattttttaatatctcttaacatatgttgtacatacggtgatcttgacgttacatttttacgcgcaaaaattagcacaaaatggctcgctgtatctaattgttttgctgcgccccaactgtgcgcttttaattcatcacgtaacgcttgatcttgaatcacgacaaacttccaaggttctaacccaagagaacttggagacaatctacctgactctaatattgtttcaaaatcttctttcgaaactttcttttgtggatcgaattgcttagtcgcatgtctgaaatgaaatgcatccataattgtttgattcatattgctcattgaacgtagcctccaatttttatatttattactatacaaattatacttcatgttttaaaaagactaaagtaatccgtttgcaattcactataacttgtgcacatgttataagttttctgcaataaaacacacttttgaattttggaaaatttagtgttataatatatttgtgatatttttcacaattaaattgtggcgtgattttaatgtacataatctttaatttcactcatttacttttcaatcttttaaaagcgaggtttttaataatgacaaaaattatgttctttggtacgcgtgattatgagaaagagatggcattaaattgggggaaaaagaataatgtcgaagtaactacttctaaagagctattatcaagtgctacagtcgatcaattaaaagattacgatggcgtaactacaatgcaatttggtaagttagaagatgacgtttatcctaaattagaatcttacggtattaaacaaattgcacaacgtactgctggatttgatatgtatgatttagatttagctaaaaaacacaacattgtgatatctaacgttcctagttattcacctgaaacaattgcagagtattctgtttctatcgccctacaattagtgcgtcgcttcccagatattgaacgccgtgtacaagcacatgattttacttggcaagcagaaatcatgtctaaaccagttaaaaatatgactgttgcaattatcggtacgggtcgtatcggtgctgctactgctaaaatatatgcaggatttggtgctacaattacagcttatgacgcttatcctaataaagatttagactttttaacttataaagatagtgttaaagaagctattaaagatgccgatattatttctttacatgttccagcgaacaaggaaagctatcatttattcgataaagcaatgtttgatcatgtgaaaaaaggtgcaattttagttaacgcagcacgtggtgcagtcatcaatacacctgatttaatcgctgcagtgaacgatggtactttgttaggtgctgcgattgatacttatgaaaatgaagcagcatacttcacaaatgactggactaataaagacattgacgataaaacattattagagttaatcgaacatgaaagaattttagtaacaccacatattgctttcttctctgatgaagcagtacaaaaccttgttgaaggtggtttaaacgcagcattatctgtcattaacactagtacatgtgaaacacgtttaaattaatatatatttaaaagcaaaggcgcgccatgtgcctttgctttttattttgtatatctgtataaaaaccagtttgattaaaatccgctttattttatcatctattcaaatgattttagtgcgcttattttactatggcattattgcctaacgtgtttgagatatattaatatttgattattcgtattcaaagttttcatttaacatgtatttagtatcataatagccgcttcattgatgatgtactacctacttgttcaatacttcttgttcgataatcgttaaaacaccctgcttatcattacttggagcgacagcagaggcaatcttgaacaattcttcatcatgactattttccatcacataactatgcttagcgaacgcaagcatatctttatcattattcgcatctccgaaggccatgagctctgaagaagacattccccatttatctaacaatcgttttaatgcctgccccttagtcatgtttggcataataatatcaatgctatcgtgcccacttgagacaagtttaatatcattgctgaattgcgttgctacttcttcgtcaacatttggatgcgtctcacgattaatattaaatgctattttgacataatcatcctcaggtaattgttgtagactgtcaatttcttttaactgatgataataaaatctcgtatcttctttaaatgcttcagaagtatgttttaaaatatacgcgcttttcaaaccacagatgacgagttgatcaatactttggttcatatttaaataatcgacaacctgttgaaacacctgacgattaaagcttttataattatataactcattgccattataaataactgcaccattttcagaaataaaatacatatctctatccccgaaaatagacttcaacttcgcatattgattgccactcgcagcaataaatgtaatatctctatttctaagttcagtaaaaatcgcttcaaatcttgatttatcgtatgtctttttcgaatctaaaaacgtcccgtccatatctaccgcaatagccttaaccatgattatcctcctcattgctcttttagtcgtcttcattatatccatctcatgacaagcaatgaagtttgtcataccacaatgaacctatattcacattttgaaattgctttcatatatgcaaaacacattacactggatatagcattcagaggcgaacataaatttcagaatattgtaaaaatataacgatatatttatcatttggacaaaatatagtgtgatatactaatttataacatctatacataatgtgaaagaatttttaaaaatacaattaaatatcggtgtaataaatccctttatacataggagttgtatacatgaaactaaataactattctttaaaagttaaaaacaaacaactagttgacaattgtgatttaaatttctatcttggtcagatcaatcacattgttggtaaaaatggtgtaggaaaatctttattagctaaagatttcttactaaataatagtggaaatatccctaagtccatttctcaaaatgtaaccttaatatcaagttcatcaaatattcctaatgatataacaaaagattttttattatcattgttaaaatcaaaatttgaaaacaatcgacaaacattcgataagatttataacatactaaacatcgaagcaataccgtctaacgtactactaaaaaacttgagtgatggtcaaaaacaaaagcttaaattattaagtttcttattggaagatcatgatttaatcatattagatgaagttacaaacgctttagacaagaaaacagttaatgaaatttatgaatttttaaatgattttattcaaagccatcaaactaaaactattatcaatattacacataatttatccgatttaagtgctttgccgggtaaatactttatttttaaagaccttcaaatagaagagtaccaatcaaaagaagaagtcataaatgattacattaatttataatttaggtgtccactttgaaattagaatttaaaaaaagtatttccaataaaattatttacacgcttggtgtgctattcatattccttttcttacttgggtattttttaccaataggaatagacaaagttaaaagtttaagctatagccagtttttcttcagttcatatactgttgcaacgcaattagggttcttactattttcatttgttattgcatattttattaataaagagtattcgaataaaaataccctgttttataaattgattggcgataatatctttaccttcttctataaaaaggtagcagtgttattttttgaatgtttagtgttcataattctaagtatcacaattatttcaattatatattcggatttctcacattacttactattaataatcttattttcactcgttatcttacaatatatcttagttgttggaacgattagtatggtttcacctaatattttaatcagcttaggtatcagcattgtatattggattggttcagtcatcttagttgccattaataaaaatatatttggtatcgttgctccatttgaggcgagcaatacgatgtatcgtgccgtagaaaaaatattgaataacgagtcaacatttatgtgtcctactgaaattataaatacagtatcattcttcgttcttctatttatagttaatactattgtcttattactaagtagaaagagatggttgaaaatcggtatgtagtacataaaaaggagcggcatccattgtcgctcctttttattatgtatttttacaatctccaccaatgacacgtcgtcattgctacctcataccaaacaaaaaaacagtctcgcaatcaagactgttttccactcaatatattcatccattagcgtaatagattatttgacttctgtagctacaaagattttacgtttttcccaaacgcctgtcttttcattgtaatcatcacaagtaattaatgttaattgtttatctttacctttttgttcatctagaacttctacatctgtaggcttaacatctcttatacttgtcattttatacttacgtgtttcattaccaactttaaagtacaccatactaccttttttggctgctttaagatttgtaaattgatagttcggacggtcaatgaaagtgtgtcctgcaattgaaatattttgatcatctagtgattcgttttcttctgcaaagcttacacctctatttaattgttcaggtgttgctggtcctggatatactggttctttaatatcagcatctggaatttcaatatagcctgccactttcgatttatctttcggaatttgaggtttagcttgctgctttttatctttactcgcctgttcttttacatttttatcatattgttcaatcttttcatctttatctttatcgtgaagataattatcgatatgtggtttagcaaacaaatatgctgccactaggataagtaccacaccagcgattgtcattaatcgatttgtccattttttcatacgttaaggctccttttatacatttcacaatgcctgttaacatttcatatagtataccattaatttcaaaatgactcatagcaattcattttatactataaaatttacatgtatacttttacgttagatttcattacacatatttgcattcaaataacgaaacgcttttaataattactaagggggaattgatatgattagatacgctaaaaaagaggatttaaacgctatattagcgatatacaatgatgccattatcaatactacagctgtttatacttatgaaccacaaaccatagacgaacgtgtcgcatggtttgaaacgaaacaacgtaagcatgagcctatctttgtatttgaggaaaatggaagtgtcttagggtttgcgacgttcggttcgtttagaccttggccagcatacctatatacaatcgaacattctatttatgtcgatgcttcagctagaggaaaaggtattgctagtcaattactacaccatttaattgttgaagcaaaagctaaaggttatcgtgcgctagttgcaggcattgatgcttccaacaaagcgagtattcagttgcatcaaaagtttgcttttaagcatgccggcacactgaccaatgtaggttttaaattcaatcaatggttagatttagcattttacgaattagatttacaagactagtaatgtttgaatcacataatataaacaagacaaccatgttaattcccttaacataacaagccaacatataaaattttaaacttctcaggggagtgggacagaaatgataaagagccactaatgatttattatgtagtggttcttacacattagccacagctaatgtgtacttaaaaataggaatacatgagtaaaactcatgcataagaaatactaatttctatagaaaaagtatttctttatcgtcgtcccaccccaacttacattgtctgtagaaattgggaatccaatttctctttgttggggccccgccaacttgcacattattgtaagctgatttttcgtcagcttctgtgttggggcccacaccccaactcgcattgcctgtagaatttcatttcgaaattctctgtgttggggcccctgactagaatcgaaaaaagcttgttacaagcgcattttcgttcagtcaactactgccaatataactttgtagagcatattacattgatttacatcgtcccttttatttattcttttcaaatactatccccatagctttgatttaacgctttttctcaataacaaaacgaatatagtagaacatgaaaacgataatcatgctgagcgataaagatttaaataatagattgacccacgttccctcagtcgtatatccatatgtaatcgttgtgttaatgatgaatgctataaagatgattgatagtcttagcatatcatcactccttttaagttattttagatatacggggacgcttttgcaatcactattttgattagtatgcattttccataaatctttcaacttcttcagagataattaagaagcatctatctggtactaatgatccagacagatgcttcttttttatcaatattttattgttatctcattaattatttttaaccatatcttcagctgtgccaaagattttacgtttaattgcttcgccagttggtgtgcctgctagtccacccaatccagtttcacgtaatgatgcaggaaggttacgaccaaccttatccattgcttcaataacttcatcaacagggattctactttcaatacctgctaatgctaaatctgctgaaattaaagcgttacccgaaccaattgcatttctcataacacaaggaatttcaacaagtccggctactggatcacaaactaaacctaataaattacttatcgctaatgccatagcgtgcccggatgcttctggtgatcctccgaatatagctactgctgcagctgcggccattgcagatgctgaaccaacttcagcttggcagccacctgttgcaccagctacacttgcattgtttgctacgacacgcccaaacaatgctgaagtgaataagaaatcaatcatttgctcttctgttaaatcatgtgttttttctaatttaaaaagtgcaccgggaatggtacccgaggaaccagctgttggcgttgcacaaataatacccatcgcagcattgacttcatttgttgcaatggcacctttgactgcgtcaatcatttcatatccagacaaagcatgatgtgtttcattataatcacgtagtttagcagcatcatgaccagtgtagcccgttacactttcaaccccatcacctgtcgtccctttgattactgcgtctcgcatgacatctaaattttgtttcatttgcgctcgcacttcatcacgtgatttaccgcttaattccatttcttctttaaccatgatatccgcaaatgacatattattttctacggcataatctatagtctctctaattgaatcaaacatgtttattccccctctaatttatataggaaacgtttacgtcactgtatttctctttaattgtatttaatgttgattctgagattgctttatttaatggtattacaaccaagcatttatcttcatctatcttaataaattcatctttacagtctaatttcatatcgttgatatcattgatgaaatgatttacttgtgctttagtcatatttccgtcaacaactaaaattggtaatccatgatttaaatctacttctagtccatttatatgaatacctttaattttaattgtaccaccaccgattgaaataccgataatttcaatgtagcgaccatcattacgagatgatttgatataagcacagtttggatgttgaccaatactatcgccttcttcttcgatgatatctattttaataccatcatcagctgcaatttctaatgaagatttaattcggttatcaaatgttgaatatcccattgctccacccacaatagcgacatctgtaccatgtccttggtgtgtttgagcaaatgattcataataatgtatttcaatatttttaggaatatctcccaatattgcgcgtgctgaattcccaatctttactgcaccagccgtatgagaacttgaagggcccatcataactggtccgataatatcgaaagcactttgataatcatagctctttgccataattaaacactctccttaatatgattctttttgctcggcattttaaagttgatattcattaaattaaacttattaattagtgttccaataatataggctaagacaatgctgacaataatcactgttgcgattgttacaattgatgtcactgcattattaaagccaaacaatacgatggcgcctgcaattggtgttgccatacctttgacacctattactagtccgctaaatgtcacgatacatgcgttgacgaccccaatcagtgcatttgtaccatatagttgtactggatattgcgctattaaatcaatttgcgtcaatggctcaatacaaactgcaaatgcttttgacggtccaccaatgtttaattttcggaataaaataaggttaacaaatgagctacctgtacatgttagtgctccaatagccataggaacacctgtcagtcctaataaacttgttaataccattgaacttagcggtgtcatacctgtaacaggaatcactagtcctaaaatgaccgctaatgcatatggattgttatcacctaccgcagtgacagcactacctatttgttttaatgttgctagcacaccaggtgtaatgattgatgcaagtccgaaagcaattgctggtgcaaataagatcaccacaattaagtccaagccttctggaactttcttttcaatccatttaattaaaaaagctacgccataagctgcgatgaatgctggtaataatttaaagtcatgtaatactaaaccaacaataaccgcaaatactggtgcaacgcctaagtttaagcacgttagaatacctactgcgataccgcttaaacttcctgctaaatccccaatatcttgtagaaatttaatatcaaatacgccaccaatagcgtaacttaagaatgcttgtggtagaaatgtcgcacaagctgcaccggataatgcttgtagtccttgtttaccgtacggtgcatactttaaaaatagcgtcatgatcactaaaaccaagactaatgtgcctacacctaacagaatatccatttcccaaaaacctctctctatgtttattttattttcagaccataaacatcgtacacccttaagaaaacgttttcaacttttatctgttatcaaatcaaatatttaagtgaaatatttcatatttgtgaaagatttttaaaatggattgtttcaaaaactacttatgttgtcattaatatttactaattaactttttactctatatttcaaacagttgtgtgacagttttttgataacttttttacatctgaaagtgagtaatatttctaaaaatctttaatatttatacactttatctttcgaactatttattttttgtttttgtgctgtgtttataaaaccgcacactatattcaaaaataacttattacacatatatttgcaataagataattaaagtaggatattatttttagttttctgataggaatgatgatagtctataggttgaatctttactttttttaaagctaaatttacatcaacttaacaatggctggttatactgaagatgaaaatatttagtataacttagtggaggcgataaaggtgcaattgagtcattccgttaaagttgcaatttctatctatttagcacttatctttataacgttcacttcttatttagtcattattttatatacgagtatgactggacatgatgtatcacatttcgtgttagatagtcagcattctcatcatggatctcttacgcaaaaacatttgagtcttcctgaaatctcatttaaatagtttatcctctgtgtttcaacattcatttcccatatcgattcatttatctatcatctagaccactacatcttagatgatttttttattttctcatttcactctttcttaaaagtcgatataatgaattaaatcattatcatacaccgacatattttatgttgttggtgttaagttttaaaggggtgagatacttggcgaataatcattcagctttgcgtttaaaaggaattatacttgccattgtcggtgcttgtttatggggattaggtggtactgtttctgatttcttgttcaaatataagaatattaatgtcgattggtacgtcactgctcgacttgtagtcagtggtgttttcttacttattatgtacaaaatgatgcaacccaaacgttctatatttagcgtattccaagatcgacgtatgttaggcaaattacttatcttcagtatactgggcatgttagttgtacaatatgcttatatggcatctattaatacaggtaatgctgcgattgcaacattactacaatacattgcgccagtttatattattatttggtttgtcataagaggcgttgcaaaactaacattatttgatgtgcttgctattatcatgacactattaggaacatttttattattaacgaatggttcattttctaatttagtcgtcaatcctgcaagtttattctggggtattttagctggtgtagcactcgctttttacacaatttatccttcagacctacttaaccgcttcggttcgattctaattgtcgggtgggcaatgcttatttctggtgttgcgatgaatttacgccatccaatttggcacattgatatcactaaatgggacatatcaattatattatttttaatctttggtattatcggtggtaccgcactcgcattttatttctttatcgacagtttacaatacatatcagcgaaagaaacaacattattcggaactgttgaacctgtcgtagccgttatcgcaagcagtctatggttacatgtggcattcaaaccatttcaaatcgtaggcatcattcttattatgattttaattttattactatcacttaaaagacaacctgaagcattagatgaataagaaaactctgataatcactttagcaagtaactatttttaacaacgtagctaccttttatgtgatatcagagttttttattttaattaataatatttttcacttggtataaaaagcgtcggcgctctggtatcggaaatactggataaatatggaattggtaatatccaggtataaagtcatgttcgataccttttgcactcaacaattgcgataagttcaaagcatctgggtacagtacttcttttgtgccaacagttaatgtaatacgacctaaaccatctaagtcaccattaattggtgatactttgtagttatctaaaggtgtgtcccctgcccattgttcagctaagaacacactgccatccacacctaccattgggtctttctttaagtagtcaggaatttcaggatgctgcatcgttgcatctaaaactggtgaaattaatacaatatgtcctggttgcacaatatgtttttcttttaacaattgagcaaatgataaagcaatttgaccgcccgcagagtcacccattacaacgatttgtttagaatctgctacttgattcaataaatcatggtataacttttcaaaaagcacatacgtcgcttgataatcttgatgcggaatcttcggatatactggcatgatgactttagcattgagtgtttctgcaagttcatcaataaattcgaagtgaattttaagtgggtcttggaaccatgcacctccatgtgcgtataatacaacacgttgatgcttatcttgtttatcattaacggtataaacggttgaaccgtagtgcttatccactgttactggcatcttaaactgataattggtgccctcatattcacctgctgtctgtggcgccattttttctaatgctttcatcgcttcttctttatacataaaacgacgcttagctctagataatcgtataccttgttctaacatataacttttcacactgcgtttttctttaattctaatatgtgcgtatgctgctactaaaaatccaaacgcaagtgtagaccattttttacgcatttgtcgtcactcctctttgatgatttctactatagttctactgtaccatgctgattcttattactaccaatatttactgggaaataagttatgatgtctacataatcttagcaatgctaatcatttgcgatattaatgctcatcgacatcgttatttacactatcattcatttgcttaagatgatgttcaaaacgttgcatatcgataaaacgcccttgacgatgcatttcttttccattcataaaaattaaatccacaggtacagtgaaaatatttaattctccagcaatagcttccacctgactttgattaatcacagctaatggcacattgggatatgattgcatcaagtcttcaatttgtggtaaaacggcatgacacacgctacactgatcgcgcatgacatgtacaactgctaacggatattgatgaataaattcacggaatgcttcgacactatttaattgcttaaccatttcgaacaccttcttactttttatattttaaaatgaagtcattattttgttgctaaaatgtcttgaaacacttgtggcacagaggttatcttcttatcgctcaatctgtaaaaaccgcctgtctgtgtaccaatacaatgcacgccatgtgcggacacaatttcaaactgaaacacccatttcatcttgcttgctttaactaagtaaatacgacctactggtttgtcatgtattgtgacaggtactttatactctgcttccgttttcataagtataggtgaaatgccttgattgatcattgttgagtaattcatgtgctgattaataaacgctgttctcaaatcttcgaaccatctaatataaacgatattactaacgacacccatcgcatcaatgtcgtaaccattcacttcgatttctttctctgcaactaatagaccttctgttgtcataatgacaaatctccttatcttacaaatagatttaaaatcatgttaatttatttttattactttcatgataaaaatacaagcaattgaactttattacggaaaatcaaacttttcaatgacgttattaatttgactagtcgtgaagatgcatttttctaaaatgtacaaaaagtacaatccctactttctatcccccaaactaacatctatgccattgctatacatcattgcgcactaaaaaggcagtagcttcattttaagctactgccttttgtaacgtattctctttcaactcgctacttcgcatacgcactacgaatgactaaaagttcattcatttgatatgctgtttcatttttaatcattatttgactgtcataattagcttacctggatcagcatcttgtacatcttcaatgacaagttctttattttcaagatttgtaataatcattggtgtaacgatgcttggtgcgtgtgctttcaagtatgctaaattcactttcattaatggttgaccttgtgttactttttcatcaacgttaatcagactttcgaatccttcaccattcagtttcactgtatcgataccaatatgaataagtacttcgacgccactttcagattctaatcctatcgcatgtttcgtagggaagattgttttcactgtaccatcaaacggtgctacaatttcacctttttcagggataaagccaacaccatcacccatcattttaccagcgaatacttgatcaggtacttctgataatggaatgatttgaccgatacctggtgcatagatgtctgttgttccaagtgcttctacgtgaactggttcatctgacatttcttcagtcactgtcgtttcacttggtttcgtaatttcaccactcataatcttggccatatcatgtttaatttgatctgattttggaccaaagatagcttgcatattgtttccaacttctaatacacctgatgcgcctaaagctttaatacctgctacatctacttttgatttatcaaccacttctacgcgtagacgtgtaatacatgcatctaaatgtttaatgttttcttttccacccattgcatctaagacatcaaatggtaattttgcgacactagagttacgaatttcagtttcttcatcttcacgacctggtgttttcaatttaaacttacgaattgcaaagtcgaataagaagtaatacacgatagcatatacaataccgactggaataactaataatgcgtgtgaacgatcccagtttaataaaccatataaaatataatctatgaaaccacctgagaatgtcataccaattttaacgcctaataaatgcattactaagaatgatgtaccagctaataatacgtgaattccataaagtactggtgctacaaataagaatgaaaattctaatggctcagtgataccagttaaaaatgcagttaatcctgctgataacattaaaccacccacgacttttttacgttctggtcgtgcatttttataaatagcaaatgccgccgctggtaaaccaaacatcataaatggatatttaccagtagtaaatgcaccagcagtaaatggtacgccatctttcaattgtgccatccaaatacgttggtcaccacgaaccaattcacctgcgtgatttgtataacttccgaattcaaaccagaacggtgaatagaaaatatgatgtaaaccaaatggaattaatgagcgttcaataataccgaatataaacgttgttaatgttaaatttttatttaataagaaattcgataaactatttaatccatcttgaattggtggccacgcaaagcttaaaagcacacctgttgcgattgctacgaccgatgtcacaatcggtacaaatcgtttacctgcaaagaatcctaaaaatggtggtagtgtaatattataaaatttgttgtaacaccatgcggctaaagcacccatgataataccaccaaacacacccgtttgtaacgttggaatacctaatactaaagcatgtgctggttctttcgctgcttgacttaattcttttgcccctttggcatatgagaaaatgtcatcaattgtaatgtgcaacactttccccattgttgcattcataattaagtaacctactagcgctgctaatgctgcaacaccgtctcctcctgctaatccaagtgctgtaccaactgcaaataataatggcaagttatcaaatacaacttgtcctgctgcttccatgaccgacgaaatcattacaatgatatcgttttttaaccatggtgcaatttctactaattgttcgttgtgcattgcgttaccaaacgctaataaaataccagctgctggtaaaatcgcaacaggtaacattaatgctttaccgatacgttgcaattgtccaaacaatttcttaaacatataaacatcccctatctcaatttccgcttccatgtacaaaaaaagcaggcatgaacaaacaagactattctcatagtgcggttgtttgctcatgcctgcattaccagtaacacgcaagtgatatctaattcatagctattatacatatttgtaaaagcgttttcaacaactttttcacaattttatcatcaattcagtacgatcatttgtgataaataaacaaaacggcaattcccattttgttgaaatagaaattaccgtttttatagttcaattcaattgtgataacctttaaatcagttataagaaacgttttgctgccactgaaattggtggaatttgatctaaatctaaatgcttatcttcagtaattgatctaaatgcccacttaccataaccaagcgcttcttcatttacaattttacctggtaatggcgcagcattaggatcaacatatacatctacaatcgttggtacatcttgtgctaatgcctcttcgactatagcatctacttcgctagcactcttaattgtataacctttaccacctgctgcctcagcaaattttgcatgatccatatcagaaaaatcaactgcatattctaattcaccagctgcttgttgttcatatttaataaatgctaactgtttgttattaagtacaaatacagttaaaggtaaatcatattgtactgctgtagcgaagtcttgcattaccatttggaatgcaccgtcaccagcaatggcaatcgcttgtctatttggatatgcaatttttgatgccatagctcctggaagaccgcaacccattgtacctaaccaacttgaaatgatgaacttgttgttcacaccaagatttaaataacgtgtagaccaaactgttgcagtaccaacatctgctgaaattactgcatcatctttaataaatttgttaattgatgccattaaacgttctggacgtaatggtttgctattattatttttatcttgttccatccatttatcccaaaccgctttacgttctaacgttttgtttaaaaatggtctttccgcaacatgtttaatattttcagttaactgatgcaatgcaattttactgtctccaacaattcctacattaatattaaaacgatgtccgatatttttaggatttgtgtcgatttggattgctttaatatttttcttaggtaagtaatctacatatggatagtttgtacctaccataattagtaaatctgcatcctgcattgtctgatatgaggtttttgtacctattttacctaagttaccaatactgtatggatggtcatccggtaagattgtcttagcaggtaatgaatgaacgaccggaatttttgccgcttcaacaaacgcacgtagctcatctttcgcatgttttgcaccaacaccaatcaacataaccggctttttactcttattgattaatttaaccgcttttttaatgtctttatattttggtgatacaacagttggtcttgatgtatctactggtttattcgttgtatctttaattttttcagttaataagtcgttaggacaaataacaacagctacacctttttgttcatatgccgtacgaattgcttcgttaacaatttcaaacacattgtcacctttttcaatttggtgattataaacggctacatcttcacataatttttgtaaatttgtttcttggaatgctttcgttccaagtgctgtactattcgtttgtccagataatattaattgcggtacattatccattttggcatcatacataccatttaataaatgaattaaaccagggccaccgatacttaatgccacaccgattttaccagttaattttgtgtaaccagcagccgctaagcttgctacttcttcatgacgtacatgataaaatttaaattgatctctcactgtacgtaaactatcgactactgcgtcgattgagtctcctggaataccatacaagtgatctatatcccatgcttgtaatgctttaactaatgcttcatttgcttttatttttgccattattactaatagcctccctttctgtctatcattttaaatatctaaattaatagaataataaaattagaacaggtattaacactgaactaataactgcagttaaaatcatcccaattgaactaaatgcaccggattcaatatccatttctagtgctttagctgtgccaaatgcatgtgacgcattcccatacgttaaacctttggcgatagaagattcaaatcttccaaatcttaataacatcgaacctaaaatactaccgattaaacccgttgtgataataaaaagtacggtcatcgtatctgtaccacctagttcatgtgacacttcgatacctactgcggctgttatagatcggggcaataacgttacaatgacgtctttagaatagccaaatgctttaagtgttaagaacactaacatgaaattcagcatgacgccagttaatacacttgcaaaaatgatagagacattgtctttaattttctctctatttttataaagtgggtacgctaaacatacgaccgttgcgtttaaaatatggttgatccaactgccacctttcatatacccgttataactaattccaaagataagtaagacaaaaataattcctaaagatgcaattaatgctggattcaaaaatgggttcggatatttttgttgtaaccttttagcgaaataatataaaacgacagtcaacaaaatcattaataaggcttgcacgtaatcattcataagcgtctacacctttacgatgtttatgtttaacagacattttttcagcaatataacctgaagataatgcaacgatacatgttcctatgataatgactgcgaaaaagagtatataatttagcgtaatttcggaagcaacatccataatacctacaactgacggtatgaagaaaaagaccatcgtctttaataaaaagtttgcaccgtcttctacccaagttagcggtacaatcttaaattgtaatagtaaataaaataaaaatagaccaacaatactgccggctaagggaagatgaaaaatcttttgaatttctgtgccaatataagtaatcacaatgatgattcctagttgtagtagtagtttgattattaattggactttgtgcatggcgccatccctttctaaatatgtctaaattgttacaataactattataaagatggcgtacacaatataaaaatactctttttttatagtttgtattactattttctatggaaacgctctctaaatttcacttcattttcacaaaaaaacactcattatttcaatgacccacgtaatgatgcgccttaaataatgagtgctttattaatatgttagcctaaacggtctttcaaaaattctatccatttcgttgtggcatgacttaattgtttatccttcttccaaacaacacctaattcccaatgtacatgagcatcttcaatgcgtagcagcttcacatctccatttagttgctctgaaattgatgttggtaaaatactaatacctaattcattcgtaactaaatcttctataacatgccattgtgaaatttgcgctacagtattcggaacaaagccaacgtttttagcattttcaataattttatcattcaagtaaaagtctttattaaataaaatgaagtcttcacctgctaaatcttcgagtttaacagtttcatattttgcgagtcgatgctctctgctcacgataagtcgcaaatcttccttatctagggtagtataatcgaaaatatgatgatcgactggcaaagtggtcacgcctatatctacttcatcattgataatttgctgttcaattgttttaccgccattttctatcaaattatatgtaacatttggatattgttgatggaatgcaccaagaatattgataagaatcttcatattcatgactgccgacatgcccatgtttatatgtcctgtttccagtccattcaagcgttccatttcagatggtaaataatcatacagtgcaacaatttctttacttttctcataaaaaatttgacctgcatcggtaagaattaaatgtcttttacttctatcaaataagggcgtgcccatttcattttcaatatctttaattgctttactaattgtaggttgtgcaatatataatgatttggaagcattagtcatgcctccttgcttaacgacttcaataaaatatttcatatgtttgatatccactaacatcatcctaactatttcaacacgtttatttcattatacacaacttcttaaacattcaataaatttagatttataaaattgctttataaaaagttttatgtaaaatacacattcttttatggtattatattaatggctcaagtatattaatcgaggtgaggtattgagcttttacgaatttatgcaaagttttcttggtgatgacacaccattaggtgaattggttgattggattaatcaagatagcaatttccctagagaagtgaagagccatagtgaaatattgtcatattttcgaacaaatccatgtcctgaaagcatctcagtacctgtaattaaacgggcactatcagttttcaaccaattcacaaatgtacaatgatacatgaatacatggagtcacatcatctcatgttagcgctctgattgcagggcgctatttttaatgttattgctacatttagtatattgtgattgctattttctttcagttatagaaccacgtaccttttcttttaaatcattttatattttcccactaatatccgctgttaatcaatcctgacatccttgtatcactatgacaattaattgttaaatacatgaatttctacattttatgaaaaaatccatttttattacaattcaacactttatatgacaacttcattacagttacttttattgttgattgcttacattgttttctaaaaaaaatttgttatcataattaacgttgaataaagaaaaaaattaacttgggagataaaaatggaatataaaaagatactaattcgtttattaattgcttttgcagtacttttctcagcagatttcacttatcaatccgtcgaacaaacgcatcaatcgcatgccgcagttaattattatagtaaaaaccaatgtacatggtgggcatttaaacgtcgcgcacaagtcggtaaacctgtttctaatagatggggcaatgctaaaaattggtattacaatgcacgtaaatcaaaatatgcgactggtcgtacaccaagaaaatttgctgtcatgcaatcaactgcaggatattatggacatgtcgcagttgttgaacaagtatataaaaacggtagtattaaagtttcagaatacaacttttatcgcccattaaaatacaatacacgtgtactaagcaaaaaggcagcacgtaactttaactatatttactaatcaaaaaacttctatcacgaacgcttcaatttcctgtatgcgtgtgatagaagtttttatttttgttcatattaatttatctaagcgctacgatggactgacctaaacttttctttaaaatcgctatttgcaatttactattgttggcttcttaaatcttgtaaaatacgttccgctgcttgtgtatttgcacggggttcttttttcaaagcttcagctactttagcaatttcatcaccttttgctcctacaacaatagctaatgatttatattgtaaactcatatgaccttgttgaataccttctgacacaagcgcgcgacatgctgcaaagttttgcgctaaaccaacggcagcaactacatgacctaattcttgtgctgactctacatttagtagctctaatgaagctttagctattggtaatactttcgtaccacccccaacaattgccaatgtcataggcacttcaattgtaccaatcaatcgttgacgatcttgatcgtaacgccatgtagcaataccacgatactgtccgtcacgacttgcgtatgcatgcgcacttgcttctgcaccacgcgtatcatttcctgttgctaaaacaacagcatgtatgccattcataacacctttattatgtgttgctgcacgatgaatatctacttgtgccaatacagaagcacgttccattcgtttggcaacctcttctccagttctctcgccccttgctaaatctttaacatcaatttcgccttgaactttaacaacggacgctgttgcatgattggataaaatactcattaaaatgtcgctttgcggaaattcattttttaaaaatgcagttatggcctctaaaatcgtattaagcatattagcgcccatagcatctttcgtatcaacaaatacttttaaagatagtaactgttgctcaggaaatgtatcaatcgctatacgttggtaaccaccaccacgcgctttaatagaaggatatgcctcatccgcaattttatgaatttgcttttctaaagctttaatgtctgctgataatttttcagtatcgtcaacgccatcaaagacgatttgacctatcataatacgttcagaagataccgttttaaatccgccagtctgattcactagctttgcaccataactagctgcagcgacaactgaaggctcttccaccatcataggtacaacatatgccttatcgtccacaatgatattcggtaataatccaacgggtaatgcaccttgcgcgatgacattttcaattaaactattggctacttcttcatcgattaatggatgattcagtaaaatgtcgaattgttcttctgataaccattgcttatcaaccaattgttgtaacttttctttacgagataaatgtcgaaaattcttatctaaattttgcatggacgtactccttttacttcacataatttttaacatttcaatcactactatttttaccacaaaataacgtcattcgtcttaaaattcaattgaataattgtcgttttgactttaaaataaaacaaggtaaattaaaacgcttacaagaaacgacaaatcatttttaaatttagtatatttctttgtataaaattagcatattctgatatgatacaagtgttgcttttataaatttgaaaggatgtaaaaccttatgacaataggtatcgataaaataaacttttacgttccaaagtactatgtagacatggctaaattagcagaagcacgccaagtagatccaaacaaatttttaattggtattggtcaaactgaaatggctgttagtcctgtaaaccaagacatcgtttcaatgggcgctaatgctgctaaggacattataacagacgaagacaaaaagaaaattggtatggtaattgtggcaactgaatcagcagttgatgctgctaaagcagccgctgttcaaattcacaacttattaggtattcaaccttttgcacgttgctttgaaatgaaagaagcttgttatgctgcaacaccagcaattcaattagctaaagattatttagcaactagaccgaatgaaaaagtattagttattgctacagatacagcacgttatggattgaattcaggcggcgagccaacacaaggtgctggcgcagttgcgatggttattgcacataatccaagcattttggcattaaatgaagatgctgttgcttacactgaagacgtttatgatttctggcgtccaactggacataaatatccattagttgatggtgcattatctaaagatgcttatatccgctcattccaacaaagctggaatgaatacgcaaaacgtcaaggtaagtcgctagctgacttcgcatctctatgcttccatgttccatttacaaaaatgggtaaaaaggcattagagtcaatcattgataacgctgatgaaacaactcaagagcgtttacgttcaggatatgaagatgctgtagattataaccgttatgtcggtaatatttatactggatcattatatttaagcctaatatcattacttgaaaatcgtgatttacaagctggtgaaacaatcggtttattcagttatggctcaggttcagttggtgaattttatagtgcgacattagttgaaggctacaaagatcatttagatcaagctgcacataaagcattattaaataaccgtactgaagtatctgttgatgcatatgaaacattcttcaaacgttttgatgacgttgaatttgacgaagaacaagatgctgttcatgaagatcgtcatattttctacttatcaaatattgaaaataacgttcgcgaatatcacagaccagagtaatctgtgtatttgaaagcatttaaatataacctaaaaacagcagtaagacagcttctcattgaaatcgtcttactgctgttctctatttataacacttcgtattgaatgaattagctaagcctgtttgacacattattgaagttttcctaatgcctggatcctttatacgttacggcttcgtgctatgttttggtacataaagctttgacatatcgatattctccaactctaacagcttaattttattattaatcgttccaccgaaccctgttaagctacccgttttaccgacaacacgatgacatggcacgataatagataatggattacttccgactgcacctccaaccgcttgggctgacatttttggcttgttaagcagcttgcctacttttttggcaatagcaccatacgttgttagagtcccataaggaacctgtcttaattcattccaaacacactgttgaaaatgactacctgttggctttaaaggtattgtgatttcaggattgtcacctttaaaatacgcgtctaaccactgtgtcgcctctctaaatatcgctaaagacgtattttcttccctagtactatcaccttgttgattttcaaacaaaacagcggtcagacttcccccatcactcacaagttccaatcgtcctacaggcgaatcatagtaactcttatactccataaaaatgccccctttttctaatcatacgccttaattgttaatttagaaaatattcatgttcacattttttaaaaataaataagtcgtcaattacgtatataaacacgtaataccagctatcactttgctgcaatatacagttacatatcttactacacgcgctaacctcttactttgtaaaccaaatcttaaattaaaatattgaaaatgcaatgaatccttaatattttattaaacctataattacttattaaaaataacacacaatattcataaagttttaaaaatattctgtttaatcatctattattagtggaaaaatataagagcaattgtttatagtttgcataacgcttcaaaagtattttcttttttgtttagttcaaaaaaatttagaggtgatgttatatgaataacggttttttcaatagcgactttgattcaattttccgaagaatgatgcaagatatgcaaggttcaaatcaagtcggtaacaaaaagtactatattaatggtaaagaagtttcacctgaagaactagcgcaactcacacaacaaggtggcaatcactctgctgaacaaagtgcgcaagcttttcaacaagcagcacaaagacaacaagggcaacaaggtggcaacggcaattatttagaacaaattggtcgtaaccttacgcaagaagcacgtgacggtttattagatccagtcattggtcgtgataaagaaattcaagaaactgctgaagtcttaagtagacgaactaaaaacaatcctatattagttggagaagctggtgttggtaaaactgcgattgttgaaggtttagcacaggcaatcgttgaaggaaatgtaccagcagcaatcaaagacaaagaaattatttctgtagatatttcatcattagaagctggaacgcaatatcgtggtgcttttgaagaaaatattcaaaaattaatcgaaggtgttaaatcttcacaaaatgccgtattattctttgatgaaatccatcaaattatcggttcaggtgccacaggaagtgattcaggtagcaaagggttatctgatattttgaaacctgcattaagtcgtggtgaaatttcaattattggtgcaacaacacaagatgaatatcgaaacaatattcttaaagatgctgcattaacgcgcagatttaatgaagtacttgttaatgaaccaagcgctaaagatactgttgaaattttaaaaggtattcgcgaaaaattcgaagaacaccatcaagtaaaattaccagatgacgtattaaaagcatgtgttgacttatcaattcaatatattccacaacgattattaccagataaagcaatcgatgtgttagatattacagcagcacatttatctgcgcaaagtccagctgtcgataaagttgaaactgaaaaacgaatttctgaattagaaaatgataaacgtaaagcggtaagtgctgaagaatataaaaaagctgacgacattcaaaatgaaatcaaatcattacaagataaattagaaaatagtaatggtgaacatactgctgttgctacagttcatgatatttcagatactattcaacgattaactggtattccagtttctcaaatggatgataacgatattgaacgtttaaaaaatatttctaatcgtttaagaagtaaaatcataggtcaagatcaagctgtagaaatggtttcacgtgcaattcgccgtaatcgtgctgggtttgatgacggcaaccgcccaattggcagtttcctatttgttggccctactggtgttggtaaaacagagcttgctaaacaattagcaattgatctatttggtaataaagatgcactgattcgacttgatatgagtgaatatagtgacacaacagctgtttcaaaaatgattggtacaactgctggttatgtcggttatgatgacaattcaaacacgttaactgaaaaagtacgccgtaatccatactcagtcattctatttgatgaaatcgaaaaagcaaatccacaaattttaacattgttattacaagtaatggatgatggtaatttgactgatggtcaaggtaatgtcatcaactttaaaaatacaattattatttgtacatcaaatgctggctttggcaatggcaatgacgctgaagaaaaagatattatgcacgaaatgaaaaaattcttccgccctgaattccttaaccgcttcaacggcatcgttgaattcttacatttagataaagatgcattgcaagatatcgtcaacttattattagacgatgtacaagttacattagataaaaaaggtattacgatggacgtttctcaagatgcgaaagattggttaattgaagaaggctatgatgaagaattaggtgcacgtccattaagacgtattgttgaacagcaagtacgtgacaaaattacagattactatttagatcatacagacgttaaacatgtggatatagatgttgaggataacgaattagtcgtaaaaggtaaataacgacactttaacatatcgcgcatcaaaaatgagcatcaggtcgcccttgcctgtgctcatttttttaattatttccctggaaaatgattcgctgtgtgctgttctgttccacaacaatcacgattaatgtcacatgtaccacattttccttgtttcgaacgtttgaaaaatttcactagtgtatacaaggcatatccgaaaattgctaaaaaaattaaaatgttaataatgactgacactttaaccactccttaaacaaataaatgtccgatttgataaaaaatgaatgttaagacatatgcagtgactagaggatagacaactgcaagtgccgtccatttccatgaataagtctctttacggattgctgccactgtagaaacacaaggaatatacaatagtataaatatcataaatgcatacgcagatagcggtgtgaattgattttgaatcacattaacaaggcctgcatcacctgatgaatagataatcgccatcgaacttacgataacttcttttgctaaaaatcctggcactaacgtagcacctgcttgccatgttccaaatccgagcggttgcactaacataccaaagaaactaccaaccatatgtaaaaaactttgattgatattcacattgataccatgtggtcctacataacttaatagccaaatgactactgagccgccaaaaataaatgtacctgctttacgaacaaagcccttagccttttcccaagtactacgccacaacgttttaatggaaggcacacggtatgttggcaattccacaataaagattgcattatcattttttaaaatcgtcttagtaagtactgtactgactaaaaatgccataataatacctaaaacatacaagcttaatactactaaagattgattctctttgaaaaagatacctacgaacaacgcatacactggcagtctagcagagcatgacatgaatggtgcaattaatatcgttgttaaacgctctttttcattttcaatactgcgcgcagccataatactcggtacgttacaaccaaatccgataatcatcggtataaaagacttcccgcttaaaccgaacgattccataatacgatccattaaaactgcaatacgcgccatataacctgaatcttctaataaagatataaagaaaaatagcacaacaatttgtggtacaaagactaatactgatcctacaccagcaataatgccatctgtaattaaatcttgtaaaaatggtataacgccaagataattcataatcgtcttcacactatctgtaaatgtaccacctataaatgcatcgagttgatccgacaaaggtgtgccaatccatgtaaatgtagtttgaaagatcaaccacataatcgctagaaagataggcatccctatatatttatgtgttaatatcttgtctattctagagctgaaatattgcttatcttcatctggatacgttaccacgtcttgcaataacgtctcaatataatgattgcgtatacgctccatctctcgacgaacagatacagcctctacttgtttatcaacttgatcacgtaaactcgacaatttatttacaacctctgaattaagttcgtttgcaatttgcatgttatttaataagaattgaatcgcaataaatctagcttgatatttatcatgagatgtctctgtcattattatttgacacatatttttaattgtctcttcaatcttctcaccataattgattttaaaatgcggttgatacccttcccctagatgctttatttcgccaagtaaatgtttagttcctttgcctgtacgtgccacaactggaaaaataggtgtttttaactttttcatcaatttatgataatcgatttttatcccgcgctttgtagctacatcaatcatatttaatccgatgtatattggttgattaagttctaacaattgtactgttaattgcatattcctttttagttgactcgcgtcaacaatgttaatgattcctgaaaatgaatcgtttaataaatagtctgtcactacagtttcatctttagaaatcggcgataaatcatatgtacctggtaaatcaattaattgtcctacattttcttttagcttccctacttttttctctaccgttacgccactccagttgcctatatattcatacgaaccagttaaagcgttaaacaaagatgttttaccaacattagggtttcctaaaatacaataattttccattcgtccggctcctattcttctaatgcaatagaacaagcatcgcaatgcctaatacttaactgttgtccgtttacttcaataatacatggccctttaaataaacatttttgtttaatcgttatgatagcgtcatctgttaacccaaaggcacttagacgatacaacatattctcattagcaatatccattcgctttattttataagccttattcatttcaccatttttaatgtttaacatactatttcgctctcctattagaaataataatcattatcacttaaaaatcataacccttaaaattgtagctcgcaatactttatttaaataattttcatttttcatgtaaaatttgtgacattgcaaaaatgttttgtataatcactttcatgcaaaaaacctccgcttcaaatgtcattgatagacatttaaagcggaggcatgtacatgttattttatgatttatttcgtagatttttttctaacaattgattgagcttttcaatatttttattcaactgttctatattcgttacttgttgttttgaatttagttgatgcttgttttgataatctattaaagcatcatataagaaaaatgaacttgctgattgctgtttcacttcttggtacaatgccatagttttatcatctagtactattgaacgtacatcatcttgcccatgtacatcttgatgtttcgatacatttgttgcaccttgtggatatattttaaaggttgtgtcgtatgtttccttactatctttagcttcagattcctgtgattcaaccgttttatatttttcaagtgcatgtccttcaatatcaactcgtggaataatgcgattcaaccatgctggtaaataccacgaaccttttccaaacaatttcgttaatgcaggaattaacatcattctgactacgaaggcatcaaagagtacaccaaacgctaatgccatacccattgatttaatcatgacatcttcttggaatacaaacgcaaagaagacactaaacatgattaatgcagctgctacaataacaggaccgctttctttcaaccctactttgatagaataatcattatcccctgttttactatattcttcatgaattcgcgacataaggaagacttcataatccatcgctaatccaaataagatacctatagtaataaccggtaaaaatgctagcattggtcctgtcgtttcaataccaaacagacctttcataaaaccatcttgcattactaatgttgtaaatcctagcgttgccattaatgacaagacaaatcctaaaactgcttttaacggtattagaattgaacggaagacaatcattaataagaaaaatgccaatacaacaattactgttgcaaataaaggtatcgcctcatttaactttttagacatatcaatattaatgacactttgtcccgaaatctccgttttgaacccatatttatcttgtgcatctttatgataatctcgtaaatcatgcactaaatcatttgtactctctgcattaggccctttcttaggtatcacgaccatcaaagcgtaatcattatctttactcatttgtggcggcgtaacgatatctacatttttcttatctttaatatctttatatacagactgtaaatcttgttgtaatccttgtggatcatcctttttatctttcacatttatcaacatcggaatttggccattaaatccttcaccaaatttatccgagattatatcgtaagcttttttctgtgtagaatctgctggtttaacaccgtcatctggaataccaagtcgcatatgactaactggtattgcagctgctactaatatgattaaacctagtaatactgccgcaagtgcatttcctgtaataaatttagaccaaggcgtatcaatatcttttttaaaattagactgcaatttgttcactttaatgcgtttatggaaaatactaattaacgcaggtaataaagtcagtgcactgaatacagcaaatataacactaattgccgaagcaaaccccatcactgctaagaaatctatgccaactagcgataaaccgcatacggcaatcacaactgtcacaccagcgaagatgactgcgctacctgctgttcctattgcaagaccaatgcctttaatgtaatctgtttcagttttcataacttgtcgatatctgaataaaataaataatgcataatcgataccaactgctagtccaatcattacggctaatgtcagtgtgacatttggtatatcgaatgcataagttaacaaactgataatgccaaccccagatgctagaccaatcaatgcacttataattggtaatcctgcagcaatgactgaaccaaatgtaatcaataacactacaaatgcaacaatgataccaactagttcagaattaccgcctacttctgtagatgtcattcctgtaccagttaactctgtttgtacattatgattgtcacgtaagtctttcaaatgacttttaacattatctctagagccatcttttaaagatgtttgactaacgtcatatgtgatatctgcaaatgcagttgttttatctttactaatttgcttattttcataaggatctgatattttatcaatgtgcttgtcatcttttttaatatcatctaacgttttcttaatatctttagtaatgttcggttgcacaataccatcatctttagtcgtcttaaagacaacacgtatttgtgccttttcactatcttgattaaaatgtttttcaatctttttattcgtatccaacgactctaatcctgtcattttaatatcattgtcaaatttcggtgcatttgtagcaagtggtatcaatattgcagctacaatcactatccatgcaatgaccgcggaccatttatgttttgcgatgaatgtccccatcttatataaaaattttgccaaagtatattgcctccttttaaaatcaacgttatagtttaaatatacagtgtagattattgttagattatagtatctatccccgacctcttaaagaatcaattggaaaattttgtatattaaactacacacaaaggagaaatgtagatgaaagagactgatttacgagttataaagacaaaaaaagcattgtcgagtagcttgctacaattgttagaacagcaattattccaaacgattactgtcaatcaaatttgcgacaacgcactcgtacaccgcacaacattttataaacatttttatgataaatacgatcttctagagtatttgttcaatcaattgactaaagactattttgccagagacattagcgatcgccttaaccacccatttcaaacgattagcgatacaattaacaataaagaagatttgcgagatattgcagaatttcaagaagaagacgctgaatttaataaagtattaaaaaatgtctgcattaaaattatgcataacgatatcaaaaataatagagaccgtatcgatattgacagcgacatcccagataatctcatattttatatttatgactcgttgattgaaggttttatgcattggataaaagatgaaaaaattgactggcctggggaagaaattgataaaattttccataaggtaataaatattaagattaaatagtagatgagaaactcatgagcgttaccaacattcataataaaaacgatagtgtacacgttaatgaattcgtgtacactatcgttttttatttttatcatgcttatcgctattaaaataactgatacacaacacataaactatgaagaaaaaaataaatccgctatctaaatgactttgactcagttgtttaaatgaccaaattgctaatacaattcccattattattgaaataacgtatctcacattcttatacctataatccttttctaaaaatatggttgctattacttaatttttaaagttataaataaaaagagccaaccgcaatggatggcccttgttcattatgaagcattagaacatttctgaaacaaccttttgttctaagaagtgtaataagtagtctggactacctgttttagcgtccgtacctgacattttgaaaccaccaaatggatggtatccaacaactgctgaagtacagcctctgttaaggtataaattgcctacatcaaattcgtttaccgctttaatccaatgctcgcgattatttgtaatcactgcaccagttaaaccgtaatctgtatcatttgcaacctcaattgcttcatcaaaatcgttaactttcacaaagccaacaactggaccaaaaatttcttcttgcatgattctatctttagatttaagtcctgaaatgattgttggttctacaaagtaaccttttgaatcatcagtgccgccaccttgttctaatttaccttcttctttaccaatctcaatataatttttaatcttatcaaattgttttttattaataactgggcccatatacgtattgtctacagtattgcccaacgttaattcttttgttaatttgattgatttctctaatacttcgtcataaacgtctttatgcacaattgcacgtgaacatgctgaacatttttgaccagaaaaaccaaatgctgacgttacaatagcttctgctgccatatctgtatcaatattttcatcaactacaatggcatctttaccacccatttcagcgataacacgtttcaagaagttttgaccttcttgaacaacggcactacgttcataaattctagtacctgtcgcacgtgatcctgtaaatgtaacgaaatgcgtatctttatgatcaactaagtaatcaccaatttctttcggatcaccaggaacaaagttaactacgccttttggtaatcctgcttcttctaaaattcccattaatttataagcgatataaggtgtatcctcagcaggtttcaataacactatattacctgccacaactggtgctaaagttgtaccagccataatcgcaaacgggaagttccacggcggaattgtaacacctgtaccaattgatttatagaaatatttattgtgttcaccttcacgatcaagtactggcttaccttgagccaagtccatcattgaacgtgcatagtattcaataaaatcaataccttcagctgcatcaccaactgcttcatcccatggcttacctgcttcataaaccataattgctgcaatttccgcttttcgacgacgaataattgccgaaacacgtaacataagctctgcacgatcatttgctgaccatgttttccaagatttataagcttcgtttgctgctttaaacgcatcttcaacatcttgttttgttgcctttgatgcatttgcaatcacttgtgatgtgtctgcaggattgattgatttaattttgtcatctttgaaaatcttctctccattaatcactaatggtatgtcttgacctaattctttttccacgtctttcaatgctttcttaaacatatccacattttcttggactgaaaaatcgtaaccaggttcatttttaaattctactaccatgtacacttaccccctataaattttgaaagtggtttaaccctttgatttaatgatataacatcatttaaactcattttactatgattaaggttagttttgcaatcgctttcatttttatgctttatcacttattctcaagtattttgaaattgattggttactttttaaaatttatatgggtcgcaactgctactttatcgtttcgtcatttaatgtttcggatggtaggtcattatcaattttacgaacgactttacaagggtttccaaccgctaagctgtgtggcggaatatctttagtgacaacactaccagcaccaatcacactgccttctccaatcgtcacccctggtaacacggctacatgaccgccaaaccaagtattactgccaatatgaatgggtccggctttttcaaaaccttcatttctatgatggaaattaagtggatgtgtcgctgtgtagaatccacaattaggtcctataaaaacattatcgccaattgtaatctgtccaccatccataaagtaacaattggtgtttacatagacattttttcctagtttaacgttccaaccataatctgtatcaaaaggaatcgaaatacttacattgtctgttgttgtttgaaataattgatcaattaattcctttcttttatttgtagcactcggtcttgtatgatttaattcaaagcaaatatctttcgctcgtgcacgttcattgattaagtattgatcaaagtttgcatcgtaccatttttctgctaacattttttctttttcagtcattacacctttcaactcctaataacttatttacttgtttaaaagttaatcaaataaacattcgcctatgcaactaatacgctataacattatgaaatcatgaccttatcacccttatctatacaattctcgcatcaaatactgctaaagtagtagataaattcaatactacagacgcattcattttttaatctattaacgtacaatgtgagtaagagaaatataaaggagtatgatagcgatgagaatattaattacaggcacagttgctatcttaatcattttaggtttggtcaaaacgatacaagatcacgaaatgacaaacgacacgagtcgtcagttgtcagacaacaaagatgatgataaagtcatccatcttaataattttaaaaatttacatgcgaaagaatttaacccatctgatttcttttaagtcacctaagaattgcaaatccagaagtcatttaagttttacctttcattcatacatcctttaatattaattacgacttcttttatatagatgctaaatagagagattgttgtgcaatgtttgcacggcaatctctctttttctttttaaaattggtaaaagtaaaacgcaacgattgacttatatacctatagggggtacattagacgtgtaacaatgaatcacagggaggcaataatgtggctaatacgaaaaaaacaacattagatatcactggtatgacttgtgccgcatgttcaaatcgtatcgaaaagaaactgaataaacttgatgacgttaatgcccaagtgaatttaactacagagaaagcaactgttgagtataaccctgatcaacatgatgtccaagaatttattaatacgattcaacatttaggttacggtgtcgctgtagaaactgtcgaattagacattacaggtatgacttgtgctgcatgctcaagccgtattgaaaaagtgttaaataaaatggacggtgttcaaaatgcaacggtcaatttaacaacagagcaagctaaagttgactattatcctgaagaaacagatgctgataaacttgtcactcgcattcaaaaattaggttatgacgcgtctattaaagataacaataaagatcaaacgtcacgcaaagctgaagcgctacaacataaattgattaagcttatcatatcagcagtattatctttaccactattaatgttaatgtttgtgcatcttttcaatatgcatataccagcactatttacgaatccatggttccaatttattttagctacacctgtacaatttattattggatggcaattttatgtaggtgcttataaaaacttaagaaatggtggcgccaatatggatgtacttgttgctgttggtacaagtgcagcatatttttacagtatttatgaaatggttcgttggctaaatggctcaacaacgcaaccgcatttatactttgaaacaagcgccgtactaattaccttaatcttattcggtaagtatttagaagctagagcgaagtctcaaacaaccaatgcgcttggcgaattattaagtttgcaagctaaagaagcacgcattttaaaagatggtaatgaagtgatgattcctctaaatgaagtacatgttggagatacacttatcgttaaaccaggtgaaaagatacctgttgatggcaaaattattaaaggtatgactgccatcgacgaatctatgttaacaggtgaatctatccctgttgagaagaatgttgatgatactgtaattggttcaacgatgaacaaaaacggtactattactatgacagcaacaaaagttggcggggacactgcgttggcaaatattattaaagttgtcgaagaagctcaaagttctaaagcgccgattcaacgattggcagatattatttctggttatttcgttcctatcgttgttggtatcgcactattaacatttatcgtgtggattactttagttacaccaggtacatttgaacctgcacttgttgcgagtatttccgttcttgtcattgcttgtccatgcgcattaggacttgctacaccaacttctattatggtaggtactggtcgcgctgctgaaaatggtattttatttaaaggtggcgagtttgttgaacgcacacatcaaattgataccatcgttttagataagacgggtaccattacaaatggtcgtccagtcgtgacagattatcatggtgacaatcaaacgctacaactacttgctactgctgaaaaagattctgaacacccattggcagaagccattgtcaattatgcaaaagaaaagcaattaacattaactgagacgacaacatttaaagcagtacctggacatggtattgaagcaacgattgatcatcaccatatattggttggtaaccgtaaattaatggctgacaatgatattagcttgcctaagcatatttctgatgatttaacatattatgaacgagatggtaaaactgctatgctcattgctgttaattattcattaactggtatcatcgcagtggcagatactgtaaaagatcatgccaaagatgcaataaaacaattgcatgatatgggcattgaagttgccatgttaactggcgataataaaaacactgctcaagccattgcaaaacaagtaggcatagatactgttattgcagatattttaccagaagaaaaagctgcacaaattgcgaaactacagcaacaaggtaagaaggttgcgatggttggtgacggtgtaaatgatgcacctgcattagttaaagctgatatcggtatcgccattggtacaggtacagaagttgccattgaagcagctgatattactattcttggtggcgacttgatgcttattcctaaagccatttatgcaagtaaagcaaccattcgtaatattcgtcaaaatctattttgggcattcggctataatattgccggtatccctatagctgcattgggcttacttgcgccatgggttgctggtgctgcaatggcactaagttcagtaagtgttgtcacaaacgcacttagattgaaaaagatgcgattagaaccacgccgtaaagatgcctagattccttaataatgaaggattcgttggtgattctgagataggctagtgattggctctataatgtcgcggtttacagttggattttcgctccaactgcatatatagttacacttttcgcttggcgaattagtgtatcttacctaatagctccgcctattaggttccatcattattataaataataagtacactacggtttacagttggatcttcgctccaactgcataagagccactaattattataaataataagtacactacggtttacagttggtccttcgctccaactgcataagagccactaattattataaataataagtggctctaaaaggaggtgaatgctatgtcacaagaaattttaaatgttgaaggtatgagctgtggtcactgcaaaagtgctgttgaatctgcattaaataatattgacggtgtcacttcagctgacgttaaccttgaaaatggtcaagtaagtgttcaatatgatgacagtaaagttgctgtatctcaaatgaaagacgcaattgaagatcaaggttacgatgtcgtttaattaggcaatattcaacgtcatcaacaccaaattaaaaaatcgaactgatgagaatcccaacaatccaaattatctcatcagttcgatttttaatttactcgtaacctagtatctccagtctgcaatacatctaatgttgcatctaatgcatcgacaattagatttttaactgcagcttcagtataaaacgcaatatgtggtgttaatatgacatcttccctgtcaatcaacgattctaacaatggatcgttcagtgttttgcccctttgatcacttgggaaaagtttgcgttcaaattcatacgtatcaagtgctgcacctttaatcacaccattgtctaatgcgtctaataacgccttagtatctactaaagaacctctcgcacaattgacaaatactgcgccctttttaaaatgtttaaataattcagcattaaatagataatgattatatttcgttgcaggtacatgtaatgtcacgatatcagcaccttcaaccgcttcctcaatcgtatctttgtaatcgacatacgttgcaattttagcattaggaaacgggtcgtatgcgaccacatcactttgataaccattggcaaatatatcggctactacacggccaattcgacctgtaccaataacagctacttttaaatctttaatggatttcgataaaatagtaggttcccatctaaaatcatgctcccgcactttcgtttgaatttgattaaaatgacgaaccacattaatagcctggttcacagcaaactccgcaattgaattcggagagtatgacggcacatttgacacaatcaagttatacttgtttgctaactccaaatcatatgtatcaaatccagcactacgttgtgcgatttgtttaatatcaagttcatttaatcgtttataaacatgctctgataatggtatttgttgtgatagcgataagccatcataaccagcgacaccttcaacattgtcatcagttaatgcttctttagtaatatctacctcaacatgatgtttctctgcccacgccttgatataaggcatatcttcatcacgtacactcatgattttaatttttgtcattttaacatcacccttaactttattattcatataaatatgctagttctgttaatcttattgcagcttcgtctaatttctggtcatctaacgccaatgaaattctcacataacgattaccattctctccaaatggtttccctggagcaacaagtattgacttctcttgcactaaaaattgctcaaattgctcgctgtcataaccaggcggtgtttccaaccatacatatatgccacctttagcatgaacaaatggcaaatcagcttttgcaagcatggcttcgaatcggtcacgacgtgttttaaatacattgctttgttcttctaaaaaatcatcataatgattcaaagcatatattgcggcatcttgtaatgcaccaaacatcccagcatttgtgtgcgtttggtactttttcaaagcttgaatcatatctttattaccaactgcaaaaccgactctaaaacctgacatgttataacctttagacaaggaataaatttcaatcgcaacatctttcccattttccgaagcaagtatactaggatttttagcgtcgaaaccgaaagcaccataagcaaaatcatgcacgattttagtgtctgtatctttaaatttagctatcgcttcatcaaaaacttctttcgtagctgtcgatccagttggattatttggatacgttaaataaatgagttttgttttatctattatttgtgaatcaactgtggaccaatctggcaaataatgtggcggttctaaattaagcgggacaggcttgccatcagctaaaagtacacctgctaaataatccgtgtagcctggatcaggtagtaatacatagtctcctggattgataacacatgttggtactgccactaatccattttttgtaccatataaaatgcacacttcatcttctttatctaacgtcacattatattgtctttgataaaaatctacaatagcttgcttgaacgcttctttaccatgaaaagcaccatatttttgattttcaggaatagttagtgcttgttgaaaatgatcaataataccttgtggcgtaggcccatcagggattccaactgccatattaattaatggcaatggtccatgttcgattttacgtcccatcgttttcccgaaataactatcagggatatttgctaatttgttagagatcatcaaattcctcctctatcattaaacatagcctgggcgactatcataatcctaacaacttgtatcactctcatttagatggttacaatgacatcgccattcaccgttatgttcaacagaacttatgacacacgttgtattgaatgaatttattttcattttaggtaggtataatattattgtcaatattaggaattttcagattaatatacactcaatcattatgattcaactgccatgcatatccgcatgcgcaaccagttagatatgcttatataaagtataacgcccatcaaggtacgtattcaaacgtgaaccttaacaggcgtcattcattgttaaataaaacttcttaagcacatacttatttcactatgccttttacgttccccttatacttttctcacatctttctcttagactactcccttacacgccttgctcaatatctttaatcatttcatctacagttattttcgcactcgttaagacaataggaacgcctgcacctggatgcgtacttgcacctgcaaaatataaatctttataatctcgcgatacattttgtggacgataataattactttgcgctaaagttggcattaaaccgaatgccgaaccaaatttcgcatgatacgtttgctcaaaatcatttggcgtaaagattgtttctgaaacaatatgcgattttatatcttcaaatacttcaatcgttgctaatttacgataaataatttcctttatttgttgcgtcaaagcttcatctgaccaatcgattccgctacctgttttaagttccggcgtcggcattagcacataaataccagttttgccttctggcgcaagtgatttatcagcgaccgctggtacatacacataaatagaaggatcatatgataaacgtccctcaaatatttcttcaatattgcctctaaagtcatctgaaaaaataacattatgaagtctcacttgatctgtcacatcaatatctataccgatatacattaaaaatgctgaacaagagtaatctaagtctgcaattttatgtggtggatactttttaataggtgcaaaatctggcattaatgattccgcaacactagggaaatcagccgtacataaaattttatcaaattttcttatgtcaccattcacttttatcgcatcggcccgtttgaatttaggatcaataataatttgctcaatttcagcatttagttcaatattaacgcctaagtctttatttaattgcgctagcccttgagccatgccatacataccgcctttaataaaatgcacaccaaacatcatttcaatcataggaataattgaatatagtgacgggcctcgttttggatcaattcctatgtataacgtttgaaacgctaaaagcttttgtatcttttcgttatcaatataatgttcaattagctgatctgcatgatttaacgtttttaacttagcaccttgcacaagtgacgtcatattataaaagtcactcggtttgcgatacgttctttctaagaaatagcgacgtgcaatttcatattttttataaacatccgttaaaaaggacataaaaccatgcgttgaaccaggttctatactttctagcatttgctgtaattcagctaaatctgtaggcaccgttatacgatcatcgtggtcaaaatacacatcgtaaatataacgtaattgtctcaattcaatataatcttcataatttttaccacacgctgtaaaaacatctttataaacatctggcatcatgacaattgtgggacccatatcaaatgtaaagccgtctttctttaattgattcatacgcccgcctacattattatttttttcaaatatcgtcacttcatgaccttgagaagcaatacgggctgccgctgctaatcctgtgacacctgcaccaattactgcaatcttcattattcaaccacctatattctatgatatttactatttatttcatgaaacaactttgcctttttccgcttatccacaaaaacacgttcatgtaatgtatagttagcctgtctcacttcgtccagtatttcaatatatatacgtgctgctaattctatgattggttgtgcttcaatactaaatactttgatttgatccataacatcttgaaaatctttttctgcgatagctgcataatattcccataagtcaatataatgattattaacaccattttggtacacttcagcaatatcaacttcatattgctttaatcgttgcttactaaaatatatccgttcattgtcaaaatcttcaccgacatctcttaatatattaatcaattgcaacgattcaccaagtcttcttgcgacatcgtatgtctgatgtgtttcatgatcacttaaaatcggcgtcaatacttcacctactgtaccagcaacaccataacaatatccgaataattcagcgtccgtttcaaacattgtaaaatgttgatctttatatacagtatcaatgagattatagaaagattgaaaggcgatatttttatgttgtgcaacatgctgaagtgccatcattattctacgatcactttgaaagtgatgatgttcatatgggtatttttcaatagattgtatatcttcttttatttgatttaaaaattgaatatcgccataaacatctatactgtcatcaattttacgacacacagcataaattgcccaaaccgcttttctttgatcttctggtaacaagtcaaaagcgtaagaaaagctttttgaatgtttcttcatgattttatgacaatatttaaaattcatatccatcattgtcatactagtcctcctatattgaaatgccattaccttgatttattgttctttagatatagaatattgacgacctttccattcaactacaccataccgatgcgtttgtttccaagattggatgaaaattttagtaaaaaacataaataacaatggatgacataccattaataaattagaaaattggccgacccttcgatgcagataaataaattgtgtagtatagctcaagtaaagtgctaccatttttcttacagacatttggcgatattttaaactaagacatagccctaaaatactcgctatagaaccaaacaaccacaacacaattgctgtcatgatcttaggctttgtgccacctgccccagttgacaaatgctttgtccatccttcttgtaatgactgaaatccttcttgatacatgcgaaatgcaacaaatggaaacccttcataaactgttacgggcaatgattgtgaagtatatgcacttcctaaagcaaatccttcaataatatgacggtttgcacttttatgacctccagttgcataataatcttctttatttgttaatgtcaccggtccaaatgcatgctggttagtccgaccgtcgtctaaggtagaaaatacattcataccaacgactgtcattaaattaaatatcgctgaaaacccttcgtagaaacgctttgttatatgataaggctgtacgcttaacaatcctttttcaccttgtaattgatactgattaatcaacgtttcaacagcatctttccttaagaaagttacatcagcatctacaaaggcaatacgattcgtacatgcatgcgtcacaccttgataacaagcatgtgatttcccataccatttgccgtcagtatcatcaacaacatctactacagtcgcaccatatgaacgtgctacacgtgctgtttcatctgtcgatccgtcattcataacaatgacatctactggaacttgctgttgtattatcgaatgtagtaaatgacctattcttttttcttcgtttctagccggaataataattgttaatgctttatgattgaagttcagcgttttcgcctttagctgatgtctacgattaaatatcaatgcaccacacgccatagacatggtcactattactgttaatattcgtgataaccatttcatagatatcacttcctattcttcgcttctcgcgcgtttattttgtctgcgacttgttgcccacttaatgtaaccattggtatgccaccaccaggatttactgatccacctacaaagtacaagttttcaaaatactgactttctttaggaaatttaaatcctttgtttttctttttatctgctacaacaccatatattgcaccacgattagaacgataatttttttcaatatcctccggtgtccaaacatcttcataaataatgtgttttcttaaatcagtaagtcccattttttctaatttatccaaaattttatccctaaacttcgcataatcttcagttgtaaaaggctgatcttgaatatatggaatatgtggtaagactttgatattttcataacctactggcgcttgtgtgtgatcagttttattcgtatttactagataaatggtcggatcatctggcaataccttttcatgaaaaacttgttgataattgagataagcattttccgtaaaaaagaaattatgatgtgctaattgcgggtattggcaagcaacacctaaatgcatcacatatcctgagcttgccggctcaaattccctctctaatttgtttaatcgttgagtatcaaggtgaattaaatatttataagtaggtatgacttccatatttgaaataatataatctgcctttacaaactcacctgtatctaatctgacacccgtcacacgtctttgatatgttttaatattgtccacacgtgcacctgtatgaattgtgacaccttcttcacgcgctagcttttccaaggcattggctaaatgatggattccaccttctacataccaaaggccttgctcttgttgcatatggaataacatagataatacagctggcgcatcgtatgatgaagaacctacatatttgataaaatagcctaacatttgtcgcaagtatggattcgagatacgcttgtctatggcctgttgcatagtatgtacataatcataattaataagagcatttaatggcccatgaaatttaataatttgagatagtgtatctaaaccatagttaaaataccctttttcagtaatacgatcgattcgtcttgtataattcaaataattttgcagttcctctatatcctgtttcgacaatatcgcattatgctgacctgtttctttaataccttcatacaaatcgatagtcgttccatctggaaaaaagctacgccattgatgtggcaatcgcttgattgtaacgtagtctgacatttgcttcttgctatattcgaataatttttcaaaaatataaggcatcgttaaaatagatggacctaaatcaaagccaaagccatctgattcatgacgattcactttgcctcctatatgattattttgttcatataatgagaccgaatagccactttgtgccattcgaattgctgcagaaatcccacctaagccaccaccaataacgatgatatgtttagtcatgacgttcacctcttcgttttaatatgcgtagtaactgcgttaatctcggtcgattatagcgttgcacaataatgattggaacattagctatcattgcatagaaaatatttatatactttactaaacgagggcctttattgaatatgatgactggaagtatcgatatccaatgaatcaactctgccctctttgtctctataatcattttttcaatttcatcagtattgattgtcattaaatgacgctgatcatatatattttgattaagctgatgaccatctaaaatcttatgtttccattttcttacgtaaaaccatttgttccaaaattttccatgcttctcaaagttaaatgatttaaatattatgtacttctgacgaaaatacttatcaggaattcttgtacctaaatttgctatatttagttgaacaattaaccaatacatactacaaaaaaatgctgttttaatatattttttcatggttttcatctaaattgaatcactctcaatcatactgacatagtataaattatcactttattacttagttccctaaagatcagtgaataaaccgctctcatttatatttatataaaacaaaaacgccaatactctcatgttagagaatattgacgtcatttgatttacatttgattaatgaatgaaattatatgaacctgcttggtttgctgaaattgtacgagacgtaaccacaccagcaccatgtccatagttcatttctgaaacacgaacagaaccgttgctgttaacgccttcaacgtaagcaacatgaccgtaatagccttgtgttgtttgcatgatagcaccaacttttggtgtattgttcactgtatagccagatgatgcagctgcgttagcccaattacttgcgttaccccatgttgaaccaattttcccaccaacacgatcaaatacataataagtacattgtcctgaagtatataagttacttcctgatgcataaccattagaaattgaacgaccatttgaagatggcgctgcagttgtagtcacatgaacattattacttgttgtgctataacttgcacctgaaccaccagtataatagttatttgttgctgtttgactattgtttgtatagttattgtattgatatgaatgattatagtagttattgtaagatgcattgttataactataagtattgtagttgttgtagtagtatgtgttgttttgcgttaattgacttggattccaatttcctgtccaagtgtaatgataattaccttgtgcatcaattgtatacgtatagctgtatgattgagcgtcattagaattatatccattgttattttgttctgcggcttgtgcatcatgtcctgcaaatgcgatagtggcaagtcctgctgtagcgattgtagctgtaacgatttttttcataattaaatatcctcccaataatcaaaacactctatacatatagtcattagcgactcaattattttaaattttatattttttatttttttagtatgcaaataattataacttttatagttttgcgacaaaacaaactataacagagattaggtgtcttgcgggctttgttatcataatgtaatctgttcctaataaagcttcattgaatgtaatataccaattagaatgtttacaacactttttctgcaccgttaccatgggatttgaaaataaaaaagcactaaacttttaatgaaatacatcatttttgataataaatatcagaagtaatgtaatatttcaaaagtttagtgcatcaaattatttcttatttgtagcatgtgtttccatcgtttttacaatcaaatcagtcagcgctttactacctgcatattctaagtgaataccgtcatatgcaaagtattccggatgacctgcagaagctttataccaatcgactagatgtacattagagcgcttttcagctgcctcataaattaatttatttattctaccttcataatctctaggtactctaatagaaactaaataaatgtctgcttttccaaaactatccaatagttcatttaattgatctttcgtaaatgccccatttgtaccaagctctactacaactttttgaccttttttagcatagtctttatattgcgatttcacaattggtgtagcatcaacgagttgccgtccaactttaccatcaatttgtgcatttggtattttcttagtaaagacattaccaatatccaccatgaccgagtcaccaattaatagtggtgatgactttttaatatcctctttgctattcgctgtctgcttatcctcttgcttatcttttttaacgacttttttcttcgttgttttaaattccgtcttcttctctttcttctcggcttcatgttgtttgccaagtgcatcaaactgtccactgagcacaacgatagacggaaccaataataggataactaacactgttctagcaaattgccccttctttttaggtaaaaatgcaaaagctttaaatccttttttacgtataggtgtttcaataaagcgatacgaaatttcagccattaacgctgttaacaaaatttctataatataaacgtataccggtatttgtccttgtacgtaataactgttcacaaaaacaatgataggataatgccataaatataagctatatgatcgtttacctataattagtaaaggtttcatacttaaaaatttagcaaataaactagaaggatgtaccgcaattgcaataatgaataaagttgcaaatgatataatgtaaaatcctccattatagatccattgatcttggtcgccaactataaagaacaaagtcattagaaccgcaaaaccagatatccctataatatctaatgatacgacaatctttttagaaatatcttttttcaaagcaaacggaggccaaataaatgctaatatacaaccaagcaataaagtttgcagtcgtgtatctgtcccaaaatacacacgtgaattatctccagtgatgaaatgaatcactatcataagtcctaaagaaatcaacgatacaataaatagcgtttgaataatatttctcggtttaaatctatgtaataagaacgtgataaccaatgggaaaagcaagtaaaattgttcttcaatggctaaagaccataaatgtttgagtggttcaatagcaaattggttaaaataatctacattctgtgagatgtaccaccagtttgaaacatagaatatagctgcaatagcatctcgtttcatttgtataatcaattccggtttaaatatcagtgtgaacgtaagcacgacacaaattaaaaacaacactgccggaatgagtcgtttcaatcgtcgcttccaaaactctagcaaatcaattttttgcgtccgataatactcacttatcaacaaacttgttattaaataacctgaaataacgaagaatgtatctactcctaaaaagcccccacttaaccattgtgcattcaagtgataaataatgattcctataactgcgaatgccctcaacccatctaatccgggtaagtatcgcggggaatacattttttctaaacgtttaaagtcttttgtatccatgttaataaacgccccatttatttttctctattttgtagcatatcacaatatttttgaaaataaaatattgcactgattttcattaattgatttaacccttaattaagatagttttaaattttttattaagtagaaaacaattattacagttaatttcattactgcaaaccacatataaatttgtcgattttactacataacatagattatcatagattcttgaatttttagcaaaataactgttattttcattatatttttacaaaaaaaggttcgttttatattttatgcctcttactgtaacagaatcattaagatatgctattcgaatatactttttcaaaatttatataatgaataaattaacatgtattgaaaaaaaagcgaaatgcagcctatcctctaatgtaaaccaaacgatatatctcgtcagactttatatttaaacgctatgtgtcacttttaaaatgaatattactaagattgtcatatcaattattattgcatcgaattaatcttttaaatttctgtaataaaacctattatctacatctaatttaggaaaactacttggtaaatctcctcgcttaatttcacggaagccattattagaataaaaatactgtgcactaataaatttatcaattgttcctaaataaataccatcgatattttgttctttacatgtcattataactttatctaaaagttttttacctatttttaaattcctataacctttatcaacaaacatttttttaagtgcagacatattattatctagtctaatcaaacctatagtaccaacaatattttgatgattgtttattgcaagccaaaattgccctccattattcaaatagttatgttcgatgttctccaaatcaggttgatcatctctatcaatttttatattaaattcatttttttgaatcgataaaataaactcgattagctcttccttataagacctattatattcaattatgtttatagccatttttatctcctttttcatttaatttaattataaaatgtgcgtttagtttgtatctagtgtactcagtacagcctcaaatgaagtttcattccacttggcacttaataaagacaagtattttagcagtaatacaataaagtccaataaatttccctaacttcaatatccactttttaaaaaatgtatttttaattaataaaaaaactctccccaatttctatgggaagagctatatatttaatgtctaaacattacttttatttattatgaaggaattagaatccccaagcacctaaaccttgtgctttgtatgctttaacagctgcgttgatttgttggtcaacagtgtttgttggaccccaacctggcatagtttggaataaacctgaagcacctgatgggttgtaagcatttacttgaccatttgattcacgagcgatgattgcagcccatgtagaagctgaaacaccagtacgttgagccatgatttgagctgctgatgaaccagtagcacctgcagtattaccattgcttaatctcactgaacttgaagtagttgaagtgctgtagttatggtaagttggagctgaaacagcttcaacgtttgagttacttgattgtgcattgtagcttactgattgtacatttgaaccttggttgtatgaagtagtgtagtctgcacctgcaacgtttgagaaaccagcagtttgaccattagctgcttcatagctccatgaccatgtagtaccatttgaagtgaagttatattggaaaccatcttttacaaagtggatgtcatatgcaccatctttgattggagctgcatttaattgatcttggtgattgtgtgctaagtcaactaagtgtgcttgatcaacgtttacttcagcagcgtgtgcttgatgtcctgtacctgctgcgtaacctgttacacctaatgccactgctaatgatgatgccataattgtctttttcatagtaaaaaatcctccagtaataattgtaagtttatgtttttagtaattatattttgaatttgaatgtcgtagtgcaagtttaaattgtcttttatttctttcaacggtactcactatatcacaaaaaaccagccagtaaattacactttctttacaaaacattacaatatcaagttttatttgtaatgttgaaatatggctgttttatactgtaatgtgaaatatgtgccctttagaatccaataaacccttgaaatagtctttaacgcataagatttttactatatttagctcaactattacagctttcgtaatattacagattgtatttttgttacatagctgtaatatatctgacatgtaacttctcttattttcgtacattaaacgcaattaaaaagcaatcaacacatatgtttctacacatgtattgattgctattattgttgtatatccaaagttttaaaacacacatcttttgtgaattgtcttatcttttataagcacaaataaactgcaccttaattatattgctaaactctattatcgtaattcacaataacattaaataatttttgatctcatattttcaaaaaacatactgttattatcccatgaatttaaaaatatcattagtatataaacgaaacactttacgataaatgatatctgcaagccaagctgttacaaatggtacaacaaagaacgctactacaattagtaagacactcaaccaagcagaatcaacctccataaatttaaatgcattaatcggtcctaccattcctataaaaccaaatccagctgactctttcgttccatgaatacctactaatgctgataccaaacctgatacaatggctgtcgttaatattggtaacataagaattggatatttcaccatattaggtatcatcattttaacgcctccaaagaagacggataacggcacccctaaacgattcactttacttgtaccaattatcaatactgcttcagtcgcggagataccaattgaagctgatccagctgctaaacctgaaatacctatcgcaaaggcaatggccacagttgatagtggcgaaataataataagactaaataccattgaaatcaaaatactcatgacaatcggttgtaattctgtaaaaccattaaccatattaccgatggctgttgtaatcattttcgtatacggcaatattaaaacaccaattgcacctgaaataccgccaacaactgttgggaatacaatcaatgccatactacctacgcgatgttgaataagtaaaatgaacaacactgcaatcgctgctgtaatcattgtattaattaaatcaccaatacccgtaatcatccaagcaccatttttaaactgcgctgcaccgcttcctacatatgctgcactcgccacaacagcaattgctaatggcgataggtcaaatttcatggcaaccaatgcaccaatcaaagcaggtactgtaaattgaattgcaacgacaacgcctaataacgttttaaaaatcggatgataatccataaagtatttaaaaatttctccaagtatcgcattaggaactaaacccgcaacaatacctatggcgacacctgataaaactctaaatataaaatctttgggtgtaattgttttaattgatgtcataatatcatccttccatttatgtatatacatctttatgcaaataataaagagccttaagttataagctgccactagcttaaattctaagatgtgcatgccgatgttgttatatttaggctagcagtaacatctataactcaagactatgaaaaatagtatatcgcaaaattctgaatttttagataaagaaattggcaatttttcaaacatattgttacaatacacttttattttatcttcatttttaaaatccattaatacaatagaagaaagacattcaaatgcttaccaaaaaggtacattatttgttaggagcgtatcagcacttatatatcatcaacacaattgacaatataatagaagatactgataataagtgttaaaacaacagatgttaggtagtgaacaaatgatggaaagtaaatccatagatccaagaatcgttagaaccaaacaattgcttgtcgatgcttttcttaaaatttctagagaaaagaaattatctcaaattacagttaaagatatcactgatattgctacgctaaatcgtgcaacattttacgctcatttcactgataaagaagacctcctagactacacattatctgtaaccattttaaaagacttgaatgataatttgagcatttctaatgtcattaatgaaaaggttctgcgtaatattttcatttcaattgcgagttatatcaaagatgctgcaaagtcttgcgaattaaatagtgaagcattttgcaacaaagcacatcaacgtattaataatgaattagaagatatttttgcgattatgttagaaaacagctatccggagcatcaacgagatatcattgtaaatagtgcgagttttttagcagctggtatctcaggcttagcattacattggtttaacacgagtcaagagacagccgatgtgtttatcgatcgcaaccttccatttttaattcatcatatagcacatttttaataaaacttggtatttagtcatgcatcttgaaatcactatgtgacttaggttcatacttgtacacacaataaaatttaacgtattacgattgattagccgtgtctaggacataaatcaacgtcctatactctacaatgtcatattagcagtcgttaactgaatgaaaataagcttgtcattaaaacatatagattttagtgacaagcatttttgtttttgcgtacttaaacaacacttcagacaatatgttgtttaggcaacaaatgatatgtgcgtgtttattggcaaacgtacaacatagtagtatagtatgtctaaacaacacatgttgcatagttgatatacgttgtttaaatactaagataggagggattgacgtgagcgagacagatgaacctcaggggtttgaacgcacgcataatatattaaatattaatcagaataggcagagtctaatgacattcattataagtaaattgaagtcgacgttgaagcaacgcataataaatgctcgtggtaaaaagcgaatcgactatcgactgtcgtataacttttacattacgtattatgatactgtagaaatcaagaaaatcgactgtgaatatacctatgctatgcccattgcaattttaataagacacacgatgtcattcgacaatgctcatttctttgctcagttacgtcatcctgtcttataaaacaacattgcagacatgtatatcaaacgacacttcaataacatcactttgccatcgtactactattaaaatcgtgtctcaaaccccttattttaattccaaaaatctgctggtcaaaagaccgagaaactaaaaacattactggatgtgttgataaattatcttatagaaataaactcaaaatatatcaacacttgattctaaggaggatatgacaatatgaaaattttagatagaattaatgaacttgcaaataaagaaaaagtccaaccacttactgtagctgaaaaacaagaacaacatgcattgcgtcaagactacttaagcatgatccgaggacaagtattaacaacattttccacaataaaagtggttgatccaatcggtcaggatgtcacaccagataaagtgtatgatcttcgccaacaatacggttatattcaaaattaatatttgctcacgaggtattgcacttaaggtgccaactgacctcataaacaaagcccatactgattgaagacactaatgtgtccaccatgtctcttacgacatgtgcacattaaaccttcatctttgtatgggctttttatttattcttttgagaatttcattttagcagaccaaaaaattaaaatggtgtccatcaagatctttgaacattgcaccataaaacccttggcttactgttggttcttgaacgactgtgccacccgcttctttcactttattcaccaactggtcaacttcttcatttgtgttcacacctagagaaatcatcacttcatttggttcagtattaaggctttgctgacttacattttgaaaatgcttgttttctattaaaattacggttgtttgacctatttgaatgccgaccattttatctaacatttgtgggtttctatttattttaaatcctaacgctttataaaactgtgcgctcttttctaaatcttgcacatgcaaattaaaccacattgattgaatcatgattgcaccccattcattacttattatagttttggactttaagccaatcacttaatgataatcttgttggatttatttcagccattaattcaaagtctacttcataacctttttcttccaaccattgcttttctgcaacaccactaacaaattctccttctataacagtagatttacctgtcacttcactaaaaattgttgctgcttcacttaatgtaacttcatcggaaccaatctctattgattgatgcgtaaagctttgtggatgtgcaaaaatatacgatgcaattttagctatatcaatagaagaaatcattgtgaattttatattcggattaataaattctggtaatgtaatacgttcatcttcgactttagcaatgcgtaaaaaattatccataaagaatgatggtttgataactgttgcatttatattagattccattaatctattttctatttttgctagtacttcaaagtgtgggccagttcgatttcgattaacccctcccgcagtactatacacaatatgttgaatattttcttgctcagctatttcaattatcttcataccttgtcttaattcttcgctaacatcatctttaacgattggctgaatactgtataagccatacttacctttcatcgctgattgcaaactaacattatcactcagatcaccttcaacgattgataaatgcggatgtcctatgtctgaaagtttacaattattcttatttctagttaatgcacttacataccatccatcctctaacaactgttttacaactgcattaccttgcttccctgttgcgcctattactaaaatatctttcattttagatccactcctctttttatcttaaaaaccaatagtcctctttttcaccttttaaatacgtatatggttctggtgtttgtccatttcctttaatattgtcgtttattacatctctgacatcccatactaaatgaataaatcgttgtaattgatgactaaaaatgcctagtggcgctgtcatagctaatactttttccacatcttctgtagtgacattcagtttttcagcaatcatttgaaccgataaggtagattcttcaaaatgtgcttgcaactcttcgcacgtaatgcgtctttgctctttatttaaagacatatgcaacactcttttcttttttaaatatttacagcactttgcaaattcattgctatctttcttaacacgttttataataaacggagagttatccgtttgtcaattttagagaattttaagtaggtgtaatcatgcgaaaagatgcaaaagagaataggcaacgaattgaagaaatagcgcacaaactttttgatgaagaaggcgttgaaaacattagtatgaatcgtattgctaaagaactaggtatcggtatggggacattgtatcgacatttcaaagataaaagcgatttatgctactacgtcatacaaagagaccttgatatttttatcactcattttaagcaaattaaagatgactatcattctaattatgaggttatgcaagtgtcgttagattatcttttacaatttaaaatcgataataaggcactactgcaatgtattgaagcaggcaacaataaattacgtttttaccaaagcgcattttatcaagaattatttgatttttattatgacttatttaaaagcgatgacgacacttacacgaagttcaaaacagatatgctgttgcaatcattatcaactagtgtatttgccttccaaatagagcatcgccatatttcaattgaagcgtacagaaattatttattaaacatttatttagatgaggtggaacgtaatgactaaaattgtgttaatcacaggaggcaataaagggttaggctatgcaagtgcagaggcacttaaagcattgggttacaaagtttatataggttctcggaatgatgtaagaggacaacaagcatcacaaaaattaggtgttcattatgtacagttagatgttacaagtgactactcagtcaaaaatgcttataacatgattgctgaaaaagaaggccgtcttgatatcctcattaacaatgcaggtatatctggtcaattttcagcaccttccaaattgacacctcgtgacgttgaagaagtatatcaaacgaatgtattcggtatcgtacgaatgatgaatacattcgtccctctcttagaaaaatctgaacaacctgttgtcgtcaacgtatcaagtggtttaggttcatttggaatggttacaaaccccgaaacagctgaatctaaagtgaattcattagcttattgttcgtctaaatcggcagtaacaatgctaacgctacaatacgctaaaggattacctaacatgcaaatcaatgctgctgatccaggcgctacaaatactgatttagttggtgattttagtaataattccaaacacgtttctgaaggaatcaagccaatcattcaattagcaacgattggtgcagatggcccaacaggtacatttattaatggcgatggagagatgccttggtagatcaattttatgttacaaacattgaaattagaggtatataaaaaatgcttctgcaatagatgcaataaacatgcaatacaatatggaggcgaagtaaatgaaaagtattacgtttgaagaacattatgtcattgaagatattcaaaaagaaacgatgaatgcgatatcagcagatcctaaaggtgtaccgatgaaagtaatgttagaaggccttgaaaaaaagacaggttttacaaatgccgacgaattatcacatcatgatgaacgtatccaatttatgaataatcaagacgttcaaattcaagtcttatcttatggaaatggttctccttcaaatttggttggtcagaaagccattgaattatgtcaaaaagcaaatgatcaattggcaaactatattgcacaatatcccaatcgctttgtaggctttgcaactttacctatcaatgagcctgaagccgcagcgcgagaattcgaacgttgcatcaatgatttaggattcaaaggtgcgctcattatgggacgtgcacaagatggttttcttgatcaagacaaatatgacattattttcaaaacagctgaaaatttagacgtaccgatttatctacatcccgcgccagttaacagtgacatttatcaatcatactataaaggaaattatcctgaagtaactgcggcaacatttgcttgttttggttatggttggcacattgatgtcggtattcatgcaatacatctagtattatctggtatttttgatcgttatccaaagttaaatatgattattggacattggggtgagtttatcccattcttcttagaacgtatggatgaagctttattcgctgaacatttgaaccaccctgtaagctattactttaaaaataatttttatatcacaccgagtggcatgttaacgaagccacagtttgatttagtcaagaaagaagtaggtattgatagaattctttatgctgctgattatccatatattgagcctgaaaaattaggtgtatttttagatgaactgggtttaacagatgaagaaaaagagaaaataagttatacaaatggtgctaaattattaggtttatcagctaacaattaacaaatggaggtcattgaatatggaaactttagaattacaaggcgctaaattacgataccaccaagtcggacaaggacccgtgctcatctttattcctggtgcaaacggtaccggagacatttttctgcctcttgcagaacagttaaaagaccattttactgttgtagccgttgatcgtcgtgattatggagaaagcgagttaactgaaccactccctgattccgcttcaaaccctgacagtgattatcgtgtcaaacgcgacgcacaggacattgccgaacttgcaaagtcattaagtgatgaacctgtctatatattaggttcaatcgttgcgatgcatgtgttaaaagattaccctgaagtcgttaaaaagattgcatttcatgaaccaccaattaatacatttttaccagacagtacttattggaaagataaaaatgatgacattgtgcatcaaattttaacagaaggcttagaaaaaggcatgaaaacatttggtgaaacattaaatatcgcaccaattgatgcaaaaatgatgtctcaacctgctgatactgaagaaggacgtatagaacagtacaaacgtacgatgttctggtcagaatttgaaattagacaatatacgcattcagatattactttggatgatttcacaaaatacagcgataaaatcaccctactaaatgggacagattctagaggctccttcccacaagatgttaacttttatataaacaaagaaactagcatacctattgtagatattccaggcggtcacttaggttatattcaaaaacctgaaggctttgctgacgtattattaaatatgtggggttaatctatcgttctctaataaaacagcttggacagttttcaaattatatttgatggctgaccaagcttatttttgtttacgtttaaaagttcaaatcaactcgttattatacatgaaggcatgttaaccattctcttccactgaaaacactactgttccaaacattgatagtcttcttttgaaataccctttccgataagcaccaaatattctggcactttttttgaaaatgctacaggtgttaattcatattgtccttgtgtaaattgaatgagatacgtatgtgcggtgtcttcaaatgtcataaaccctttcaacctataaatatgagacggaaggcatgctaaacgttttataaactctgctttagtacatttggctggtgattgcacaaattgatgattaatcatttgatgtaacgacttatgtttattgtcagaagttgctgtcatttgtctaactgatattggcaaagtgacgctgccatgcataccgacttgtatatcggcctctgggttaataacttctaaatctttcaatagtttgctcgttgtttcaacatctgctgaatctattttattaacaaataagacagaacaatatgctaattgctcataaaataagccttggatgtctttagggaatgatttaatgtgtttatacatgcttgcgtctattacaccaatcatatgtgtaattgttgtaaacggagctaaaataggcgttaaacaagcatctaagacagagactggttctgcaatcccactacattcaataaatacaatgtctggttgctcttttaaatataattgatgtaactgttctgatacatctgctttcattgcgcaacagatacacccctctgtcagttcacttaaaggtatgtcttcagatactaaggcaccatcaacactcattttcccaaattcattcatgatgactgctggtttcagcgattcctttaatgattcagcgagcaaatgatttaagacagtcgttttaccgccacctaaaaacccacctataataactattttcatctgcgactctcctcttatacttcatatgaatagcatattccaagatagatctcctattgactgacatgactctatattcagttatagttcatttttttaaataatcagcattactattttaacaatgatgcctacaccaataactaaagacaatgatgtcaccatttgctttccaattaattttagtgctgactgaccacctaaatgtttcaaaagcatcgtcattgtgaccgagcacactgtaaaagttgaactaaaaaacacaagtagtagtaactgtgttgctgtcattccttgtaataaggcgccctgatgcaaattaaacaagagcatgccgtcttttcgaatcattgaaaataaaatccctggtgacaattctgacgagatgcctaataacgataatataggtgtaaatatttgtgataaaacattcaaaattggcgttagtgataaaatactaacaataagacagattgtgataaaaataggtagcgcttgaacgataaacatttgtatattttgccacatttgcagcaacatttgacgtatatttggcatatgtaattgtctatcataaggtagcggaacgctaagttgttgatcattctttttcaaccatatcctattatgtaagatgccacctaaaagtactaatattaagtacggcataaatagccatgactttccagctacactaaaaatagataatgtcgcacctatttgataactacaagaactaccaaagcttattaaactcatacactgtgtcttcgtgcaggtatggcattggtgtgctgcttgtgaaatagctgctgcattacatccaaatccttctaatagtggcacgatatcattaccttgtaatccgatccataacattgacggttcaattgcccatatcatccatgatttgagtcctgtttgatcaattattgcagttgataaactaattaatattacaaccggcaatgcccatacgagcgaatatgttccaagtgatagcacaccataatcaccaaataatatatgctgtaatatatcgtgattgagcaatgttgtttgagttaaatattctatccatgctgatacatactgattttgaaaccaatctgaaaattgataagcgataccgattggtaatgcaaacattaaaaatatcaacaaccaggctaaaaatgtcgcacttattttaggccttaaatgtcgtcgctcatgttgaaatagtgtcaattgttctatcacatgttcgctcgctataggcgaagaaactacactttctgccaatgaaatatctaacttctgttttatgattaataatcttaatttcgctttttctgttgcggtaagtttatccgcatgactaataactaaataatgaggttcattaggtatgggcgtataatgcccagttctcatatcatatttcacttctaacatgtgcatgacacttcacaacatgaataatcatctaaatacatttgatttttttgataattttcaatgacatcttgtttagctggtaagccttcccgctgtgttaaaagatgggcaagtactgcaaatcgcgctctgaatttatagatatagcataatttggcattatcattttcaactgttgcaccaatcataaaaatattcggataacgtgtcgattcatcatgtgttgttaatttaatatcttgatttgttgtcacaaataattgttgaacgattggattttttgttgcatcaaagccagttgctagtattggttcatgaggcgtatgcacactttgtccgctatcaaaactgatatgatactgtccattgttaaaatcaatatctttaactgtataatgtacattcatttcgatgcgagcaccttgcttaatgacattacctagtcgctgacgtgtataaggtgacaatctaacactaggatcagcatccggatcatttaaaccggttgtgctagtataaagtgcgatgtcagagccattttttgcaagttgatatgcagcatcaaagccactttcattacctccgataaccacatattgccccttattaaagttatcaaagtcttcaatttcactataatgaataccatatttaaatggctttttagggaaattataatcacctgttgcgacaaagatataatccgcgtgatatatctctgttgtcgttgcaatcgtataatatgcatcatctacagatatatttgtgacaactgtattttcaaagatattcagctcgtaatggttggcaaccacttgtaaatattcagcatatgtttctccggaaatatgttcttcattaaatgtaaatgctggtgaagtatccatggaaattgcattcatatcaggcatgccaaatccattagacgtaaatgatggcgtgatcgtacgagtcgatttcggccaatgtttaaatgaatgtcctactgttcctttttctaaaataatgacatctgttataccgaaatcttttaaggtaatggccatacctatacctgcagcaccggcaccgataatagccactttatgatgttgcatattaacactccctcaatgatctatttcaagttattgtttttgactataaatcgtaataattacgatttataaagtatagacctatccttgagaaatttcaatattaaaagaaaaacttccgttattgtagagaattcatctacatttcggaagttggtatgtgtcttttttattaaatttaaagatgctacggttagttcaaatgattatgaatgacatttcatggtatcatccagcctcagtacttggagataacattttggcggtgagacagaaatcatatttttacaaaatttattggggtgtaacttctccacgttgtatttcactatccaaattttgtttcatattttcaaacaactcttgaaatctaacctcatcttgatcagaataacctttaaaaataactgaatctatattttcctcgttaaaataataaatttcatcttctacaacaccaatcggatatttacatgcagaatagtcaaacatatacttttgattttcaatttctacaattggtcctctattaataatcattaacttttgcgaaccttcttttaaataaataatgcttcctattgtttccatttattttcctcctttgtcaccgtctcaatttcaacattccttcgcatttccaagtcaatcatctcttcttctgctttacgaatgccatgttgaatttgctgttgctgctcgtataacgcttccgttgaacgtcgtttcgcaaaatgaaattcatcgcggaactgttccatacgactagccatattgctactataataacgctcacctaaatgttgatataattgatctatcgaatgattaagcgcatcactttcatctatcaatgctttaacctctcgcttttcatcatataagtcatccatttgcttatgtttcgctgtgattattttattgatttcatccagtttattcgacatcatttcaccacgttttaatttttaccaatttcattaccaatcattacgtcagtttggtcaaaagcctcaccaactttttgtatattatcgctcgcagttcgtattgcttcagcaacagattgattcttactcatcaaatcatctatcacactatgagcattattatttccacttactgttgtactttcatctttatccggtttcgacacattattacatgtttcaacagcgcttttaatagatgatgatgcactattggtcttaaaaatatcactttgaactgtactcatcatttacacctctctctccattttaattattttaaaattattagaaactgtatcaatatatgatattcaaacattcaattatacttaaatattgttttatgattatattcaaaattattgtatcaataaatatgtatcattcctagaattttattgaacaaaaagttataaaataacttttattgcaactcaaccttgttttacattacagaaattaacaatagcgattaaaattttattttccaacaataaaaaagcacaaatatttttattgaggcagctgtatcgcttctcattgtaaaaatatctgtgcatattattatctcaatctaacgtaataactaacttgttgtatcttgtaaaatcttattcatagaatgcgcaacactatcacggtacatttcaccaaatttcaataaatggaccatcaataaatataaacgataaaattcaagtctataggatgcaccttttgcgagtggataatgtttattatacgcatcataaaattcgctcgtaaaaccaccaaataccgttgtaataccgatatcgaattctctgtcaccatataatggtgctggatcaaataatgcaggacgtccatcttttaaaaacatataattaccaccccataggtcaccatgtaataaagacggtttactttgatgcttttctaattccgccacaatttgacgtcgcactttgtcatatactttgatatcgttggcatcccatagccctctatttagcaactcatctttcaaatggtccaagcgcttgtcgacaaaaatggtacaccaatcgtcttgccaatgattatcaaaagaaatatcgccaccttcataaggtaatgagaagccaaatttgccttcttcttgttgctgactgtgtaattgagctacgagttgccctaattggcgttgactccctgaagccccttcttctaaatacgtcatcactaaatacgcatcaccgttaacctcgccacttgcaattactctaggtgccgtgatacctgcacgttcaaattcatttaaacctgcaatttctgcagcataaaatgattctttacgtccacgttggacaagtaagaaaaatgtatccgtatctgtttcgactcgatatgcttcgtttacatcaccaccactcactggtgaaatctctttaatatcttttaaaggtaaatgctctaaccattgttcattcatacaaacaccttccaatctacttactttatactataatattgcctaattaggatgatttaatcttaaaaacgttattcaaacttgcgtcaattttcaaaactttttagttttaactaggaaattatgtagggaaatgctagtctattaaaagaatatatttcacatatattaagttgaggatagtaagcctcaaatataatgaaataggagcatactcatgtacaaattaattaaacctttcttattcaaaatcgaacccgaaaaagcacacggactaactatcgatgcattaaaaacgttacaaaagtttccggttttattcccagtcgtcgataaactatttacttataagaatccaacgttatcacaaacgatacaaggtaatacgtacgacaatccaattggcttagcagctggtttcgacaaatcttgcgaagtaccaaaagcattggaacaccttggattcggtgctttagaattaggtggtatcacacctaaacctcaaccgggtaaccctcaaccacgcatgtttagattattagaagatgatgccttgataaatcgaatgggcttcaataatattggtatgaacaaagcactcagtcatttgcgtaaaaatgcttatcaagtacctgttggtatcaatgttggtgtgaataaaatgacaccttatgaagcgcgttatcaagattatataaaagtcattgatacgtttaaacacgacgtttcatttttcacagtcaatatcagttctccaaatactgaaaaccttcaaaatttccatgataaagatgaattttcaatgttatgtcaagctttgacaacatttaaaaaacaacatgatgtaacagtgccaatttatttaaaactaacgtctgatatggatttcgatggcttaaaagcactattaccagcgattactgagacatttgacggtatcatcttagcaaacacaacgcgacaacgagatggtttaacttctgctaataaagtcgaagaaggcggtttgagtggtcgtccattatttgaacgtaatttaaaattgattaagtatgcttatcagcaaacaaatggtgaatttttaattataggtacaggcggcgtattcagtactgaagatgcaatcaaaatgatgcgtcacggtgcgtcacttattcaaatttattcatcacttgttattgaaggcccaggtttaactaagaaaatgaacaaaggcatcgcacgttacttaaaagatcatcattttgacaatgtcagtgatattataggactagatgcctaatccaacatagtcaaataatactttaaaacttgctgaatcgtcttattaaaattatgatataactcaagaagatatatttatcaccatttttcaaaataatggcttaaatatcacatatcattaaatatagcgttttataacggaggcgtttgttatgactaaagaaacagataataaaaaaacagtagcgacttctgacaacaaagacacacagcaacaaaatcaacctgaagaagatgaacgtcaaggtttgaatggttatcgtaaaacagatcttgatttagaaatcgagcaagagctacgtgaaatgatgaaaacaggagaaaatgaaacgaaaaatgactataaaaagtttaaagtgttttcacttatttcaacacttgtcattgtcattttagcaattataagatttgttcataaaatgatgtaattagagtgagacattgttttatgtctcaggatccagttattcattatatctacaatatttacgattatataaataacccgagattttagtatgattcatttcactaaaatctcgggtttctatttgataatttttaatgggatatggcatgtatacgttcttgccttttatctcatttccaatgattaatctggatattgttctaaaaatgctttcgcttctttattaactgttttaaaatcaataccttgttgcatcgctgcaaagacacatccacaataacactgcctaaagatattatagtcattacacatttctatggaacgctcataacctttacttttcttaaaatcacttggcaaatagttcacatcgtatattttttggacatccataccaagttcattgattaattgtgcgttctttttaggtgataatgtgattgcactgccaaaataatcatagccatgttctacagctgctttcgctacaatatccaaacgcatttcaaaacaagcggtacaacgtaagccgccttctttttcatcagctaattctttatccttcaccattttcacaaacttatgcggttcataaggtgcttcaatatacttcacattcgcaccagtcttgcgattaaaatcttccacaaattgttcttgcactttagcacgtcgtaagtactcatttttcggatgaatatttgaattcgcgaaataaattgcaatgtctgcatattgtgttaaaaactctaatgtatatgtactacaaggtgcacaacaactatgcaataagattttaggtctgattgcttctctttcccactgcccgattaatttcttcaacaccttgtcataattaattttttgatttttcattttactgataataggttcagcattaatcatgatttaacctcccacatttaatcattaacttctattatatatgattcatattaaatgtcagtcaaaaaagttagaaattcattttaatgcatttatatttcgaaaatcccttatgtatctaaaagcattttttaaacttgaattttaaaacactaaacaacacatacgtctctgtgtcattttcattttttgtatgtcatatatatgtttacttcatttaaatcaatttcatcttataatttatcgtgtattttacaaaagattgacttcaattcatcgtaaaagttatacttttgccattttttaatgtaacatggtgttagtaataaaaataatacattgaggtgttttatatgacagcattattcccttatatcgcttttgaaaattcaaaagaagccattgcatattacgaagaagtatttggtgcaactgacgttaaacgtttagaagttggcgaagaacaagcgtcacattttggcatgactaaggaagaagcgcaagaagcaactatgcatgctgagtttgaagtgcttggcgtaaaagtgctatgttctgattcttttggtcgcgctgacaaaattaataatggcatatcattattaattgattatgatgttaacaataaggaagatgctgataaagttgaagcattctatgagcaaattaaagatcattcttcaattgaaatagaattaccgtttgctgaccaattctggggtggcaaaatgggcgtctttaccgataaatacggtgttcgttggatgttacatggtcaagactatactgcaatccaacaataatgttattgataaagatatcatttaataagcttatgttatttagcaaggcaagccactctcgattcatggcttgccttattttattgtatatttttaattatcgttgctggcccttgattgacaatcgtattaaaatgccttattaagtcaactttgtctatacggtttggatcttctacccaatgtcttataaaagacaatcccgcacctgaaacataactcatgaaataagaaaatggtataccattaatttgatcattttcatttttataacgttgtaaatgacacataattaaatcataaagtttttcgtggatatttgaatctttacccatacgaaacatcaattgataaaatgcgatgtctttttctatcatttctattaaaacggtcataatttgatgtatgttatccgtggataacttaactgctccatttaacttctcatcatgaatgaagtctcttatttcctccaactgctggtcctctaatttttcaagcaaatcatacttatcataataatgcgtataaaatgtactacggttaacatcagctaaatctgcaatttgttgcacagtaatctcttctaattggtgttgatgtaaaagttcaataaatgcatttctcattgcaacttgtgattttctaatacgtcgatctatagtcatttgtatcaagtcctccccaatgattataaacaattataaatgttattttcattatcctacaaatctccaacattgatgattggcacacaatgtttacctgtttaatataggtgatacaaacaaacagaaaaaggtgataacaatgaaccaacatttactaggaaatccaaaattaactgtaactcatgtcaatgaagtgaaagccggtattaaccacatcgttgtcgacagtgttcaatatggaaatcaagaaatgattatggaaaaagatgtcactgtggaaatgcgcgatggcgaaaaattatatattaatattttcagaccaaataaagatggcaaattccctgtagttatgtctgcagatacttatggtaaagataataagcctaaaatcaccaatatgggtgccctttggccaacattaggcgccattccgacatctagttttacacctgaagaatcaccagacccaggattttgggtgccaaatgattatgttgtagttaaagttgcattacgcggtagtgacaaatcaaaaggcgtcttatctccatggtcaaaaagagaagcggaagattattacgaagtgattgaatgggcagcaaatcagtcatggagtaatggaaatatcgggacaaatggtgtttcttatcttgcggtgactcaatggtgggtcgcatcattaaatccaccacatttaaaagcaatgattccttgggaaggcttaaatgatatgtatagagaagtagcctttcatggaggtataccggatactggcttttatcgtttctggactcaaggtatttttgcgagatggacagataatccaaatatcgaagacttgattcaagcacaacaagaacaccctttgttcgatgatttttggaaacagcatcaagtgcaattatcacaaattaaaacacctctactaacatgtgctagttggtctacacaaggtttgcacaaccgtggctcttttgaaggatttaaacaagctgtatcagaagaaaaatggctatatgtgcatggacgtaaagagtgggaaagttactacgctagagaaaatctcgaacgccaaaaatcattctttgatttttaccttaaagaagaaaataacgattggaaagatacgcctcatgtcatttatgaagttagagatcaattttataaaggcgaattcaaatcagcgtcagcgttccctttacctaacacagaatatacaccattgtatttgaatgctgaaaatcacacattgaatcatgcaaagattagtagcgcgtatgtcgcacaatatgactctgaagataaacgacaagatgtaagttttaaatatacgtttgacaaagatactgagttagttggaaacatgaacttaaaactatgggtaagcactaaagactcagacgatatggatttatttgcaggtattaaaaagttagatcgtcgtggtaatgaagttaacttccctgattttaatcatattgaaaatggtcaagtagctaccggttggttacgcgtatcacatcgtgaattagatcaagaaaaatccacaattgcgcaaccttggcataaacatgaaacagaattaaagttgtcacaagatgagattgtacctgttgaaatcgaattgttaccttcaggcacgctatttaaacaaggcgaaacattggaagttgttgtaaaaggtagtgaaattgtaattggtaatagtacccctggcatgaaaacgcgttatgaacatgaagaaaccgtaaataaaggcatgcacatgatttatactggtggtaaatatgattcacaattaatcattcctatcgttaattgatatgcagcaattacggtcgcttttgattaaaagtgacatagtgatagaagagaaggccacacgcttggaatcttaaaccaaggtgtggccctttttattattgatggctatttaattttataaatcttgtcactaaacttactacaagcaatattaaaccaataaataaagccattattgctgtattactttcgttgtttactcctgtttttggcaattctttcaattgttgcttatgtactgacttgctcttgctatccaaatgaatactttgttgtttagccatttgtttattactttttgtgtgaatatcatttgctttaatacttggatttacagcactattattcgatgttccatttgcgtttttcaactgattaataacatttggatctttcgtgccatctattaaattatctggatgttttagtaaatgtctgcagtcggatactattttagaatcttttgcctttaccgcattattcggcacctcattatcatctttcaactgcttgataacatctggatctttcgtgccatctattaaattatcaagttttttcacacgtgctatgtcactaactggcccaggataatttgcatccggttgtctaactggtattaaattgctgttttcattcacaccttcaggcttgttattttcggcgttcgcattatccgtaaaaatcaacactgataaaattgcaacgataatacctttacttctattacgctaacccaattggcataaaaataaaaacccctaatggataactacattgttatctactagaggtttctaacttatactattttataacactatcgtattttctttttcatgaatcatttcaataatgacattgtcttcattcattactgctactttaggtgcatggttttgaatttcttcttcattcaactgtgcataagtcatgattatgactacatcgcctacttcaacaagtcttgatgctgcaccgtttaaacaaattttaccactacctctttcaccagctattacgtatgtttcaaaacgtgcaccattattattattcacgatggctactttttcatttggcaagatgtctaccgcttccaatatatctgaatcaatcgtaatgctacctacataatttaaatttgactcagtcactcttgctctatgaattttagcattcatcattgttcttatcactttattcagctccaattattatattatctattaaacgcgcttttgaaaatttaacagctaacgagataaatatgcgtccagttatttcgtgttgttctactaattgaggataactataaacagcaacttcttcaatgcgtccacttatatgtgattcaagatattcagtaaccctgtctataattactttactttgacgttcaccgtcttgatacaacgcttgtgctaatagcaaacttttacttaaatgtaccgcttcttgtcgttcttgctctgttaaataaacatttcttgaacttttcgccaaaccatctgcttctcgaacgatatcaataccaataatttcaacggcatgattgaagtcttttaccatttgctcgacaatagccaattgctgggcatcttttttaccaaaataagcataatccggcataacaatattaaatagcttattaactactgttaccaccccatcaaaatgccctggacgcttcgctccttctaacacatcagctaatggacctactttgacatcaatacctaattcacctggatacatatcttctactgcaggatgaaaaacaatgtccgcccctacttccgatactaattctaaatctttatcaatttgtctcggataagcatcgaaatcttcgtttggaccaaattgtaatggattaacaaatacactcacaactgtaatatcatttgtactaactgattcgcgtaccatcgttaaatgtccatcatgtaaggcacccattgttgggataaaaccaatcgttgttcctgagcgtttggctgctttaacaatgtgttgcatctcttttaccgtagtaatcagcttagtcattgttattaacctcattcataattttctttttatacgtatattcttctgatggaaatgcaccagatttaacttcttgatcgtattgttttaaaccatccacaccaacactaaaatcagcaaattgcttcacaaatttcgctttatgttcaacaccataatttaacatatcgtgataaaccaatacttgaccatctgtaccttttcctgcaccaataccaatgactggaattgttaagtgcttgctaatttcttctgctaaatcatttggaattgcttcaagtactaacgcaactgcaccagcttgttctacatttttcgcatctaaaataagttgctccgctgcttctttcgttgcaccttgtaatttataccccataacgccaacactttgaggtgttaatcctaaatgtgcaacaacaggaataccaattgccgttgctttttcaataaatggtgtaatatgcgctccttctgctttaattgcatttgcattcgtctcctgataaagctttagagcatgatttaagtcttgtgtcatagagatgcctactgcaccaatcggcatatcaacaactacaaatgtatttggtgcgcctcttcttactgcacgaccgtgatgaatcatatctgctaacgtcacttgtacggtactttcataacctaatacagtcataccaagtgaatccccaacaagaatcatatcaatacccgctgcttccacttgtttagcacttggaaaatcataagctgttaccatagaaattttagtttgcttttgtttcatatctattaattgacttactgttttcaatgttattcaacctctttttgcagtattattagaaatagtataatgaatcttttatagaaaggaaagaagaagatgttatcagttgcgattatcggcccaggcgctgtcggtacaactattgcctatgaattacaacaatcattgcctcatacaacgcttatcgggagacacgccaaaacaataacatattatactgtaccacatgcacctgcacaagatattgttgtgaaaggttatgaagatgtcacaaacacatttgatgttattattattgcagtcaaaacacatcaacttgatgcagttattcctcatttaactcatcttgcacatgaggacacgctcatcattttagcccaaaatggttatggtcaactcgaacatatttcatttaaaaacgtatgccaagcagttgtctatataagtggtcaaaagaaaggcgatgttgttacgcacttcagagattatcaattacgtatacaagataatgcattaactcgacaatttagagatttggtccaagacagtcaaatcgacattgtattagaagcaaatattcaacaagctatttggtataaattgttagttaacttgggcattaattctatcacagcactcggtagacagacagttgcaatcatgcataatcctgaaatacgtacactgtgtagacagctattactagatggttgtcgtgttgcacaggcagaggggttaaacttttcagaacaaactgtcgatactattatgactatatatcaaggttatcccgacgaaatgggaacgagcatgtattacgacattgtgcatcagcaacctcttgaagtcgaagcaattcaaggctttatttatcgacgtgcacgtgaacacaatcttgacaccccatatcttgatactatttatagctttttacgcgcgtatcaacaaaatatgtaagctcatatataatataaaaagaccttaacgatgcatttagaaccacctgttccttatatcgctaaggtcttttaattatattagactattcagcttctctaatttcttctgccacatctttatagtctattttcgctttaacaaacgtctcgttatttaccgggaaatgttgttggaatgtttcaaagttttgtatctcaacgacaacgtcatccacttcaaagtcaagaacatgtccaccataagctctttcatcatctgcaaaatgtatatgaaaaccagcagatcctacgccatgaaataattctggtgtaaaaaatccaacaatggcaccacgaatattttgtcttttttcctcaggttgtctgcgtgctgaatcaatcaaacgtgtatatggcggttgctgagcaggcatcattcgtacatgcatatgtttaaatgtgccataaattttaacagccgaaaataaattctcacttaacatttcatttttaatttgtgcgaatacatcatcttgtgataattgttgcaatgaaaatgtcttactcgctttaaaattagtaatcgatgcatacggtactttctcatcgccttttaattctataaattctttatgctcgttagcatgatatgccttcccgtctaaaaatattacttcgccatcagaccctgttaacgttgcaatccctaaattcccatgttctaacaattcattaattgtagctgtgccttctagtaagccagccattaacgtacctaatgtaccatgttgatacaagacattcgtcattccaaaaccatctccctatagttattcctcgttgtcatgctctacttcgtgattaatgcagaactactttcctttatactcaatgacgcctcaacatttttattcatgtcactaaattttcacgagtcataatactttattcaattattattttacgcaaaagtattgcctctatcaatgcttgctaaaaaaatggacctatcagtgccacgtgttactgcaacactaatagatcctcttaccattaatatatttctaattaatacttaaaataggcttagtcttctaataaatatttaattgaatcaaatgtatcttctaatgttttaacagatttatcgaacaacgcttgttcttcggcacttaatggcatttcataaattttaactgcgccatgttggttaactaatgttggtacacctaggtaaacgcctttgtgaccaccatattgaccatctaattgtatagaaacatttaagacattattttcattatttaaaatggcttttgaaatgcgcatcaatgctaatgcaataccatagtatgttgaccctttagcttggataatttcataagcagcgtcacgtgtatttacataaatttcttccgctttagcttcgctaccagtttgttcttttaatgtgtcatatactgaaatacctgctacatttgcttgtgaccaaactgcaagttcagtatcaccatgctcaccaataatactagcgtcaacacttgaaggtgcaacaccaagttcttggctaattaaatattgtaaacgtgcactgtccaatacagtacctgaaccgataacacgctctgctggtaatccagtatattcttttacaaatcttgttaaaatgtctacagggtttgccgcgattaagaaatatccatcaaagccactatccataacactcttaacgatgctcttcataatcttagtatttttttcaactaattgtaaacgtgtttcacctggcttttgaggtgcaccagctgtaataacaactaaatctgcatctttacagtcttcgtattcacctgctttcacatcaactggtgaaggactgtggactgtaccatggtttaaatcttgaacatctgcttttactttgtcttttgcaatgtcaataattacaaattcatcagcaacaccttgcgtaaccattgcaaaggcatagcttgatcctacagatccatctccgattaatacaacctttttaccaaatgttttcataattatgtctcctaacctaattgaatttattttacacgtgactacacgtaaaaatatctatactgaaattaaagattaacaattttattttattataatattatgctaccaaattacaaacataaaactgagatgtaagcggagtcaaattacactctatcgccaataaatattgatatctcaagctttagcacgtaatttgaaatttgtgacaatttttagcattctaaaattgcgtaacgacgctatttaaaggctttaacaaactattgagctttctatttttttcattttaaaaaggatggctattcgacttaaatgacttactatataacctcctattttccgccttaccctcatcatatttgatgcatcattttatagtcaaagaattacatttcatacaaactagccaatcagacataaacatgaaattgattttaaaaatataatgtgcaaaattgttagaaaattagcaaaaaatagtacttattcatttaatatctgttataatcagttttatcatttaaaaaatctatggatgttatcaagacaagtcattaatacgtaacataaagttgtgatttttcagaatttttagacaaaatattgattatttgtgctatgatataacatattaaaaaacaccgtatagaattgtttatgaatgtttgggaggaaagtttatgggaagttttttcaataaaatagcacgaaaagaggatccggctatctatcaaaataaagatggtcatttaaagcgtacacttcgggtgcgtgatttcttagctttaggtgtaggaacaattgtatcgacatctatctttacactacctggcattgttgctgcagaacatgcaggaccggccgttgcgttatcattcttactcgctgctattgttgctggtttagttgcatttacttatgcagaaatggctgccgctatgccatttgcaggttcagcctattcttgggtcaatgtattatttggtgaattttttggatgggttgccggttgggctctattagctgaatattttatcgccgtagcctttgttgcatcaggattctcagcgaatttacgcggacttgtgaaaccaattggcatcgaattaccagcagcattatcaaatccatttggtacgaatggcggttttatcgatattattgctgctatcgttattttattaactgcattattactatcacgtggtatgtcggaagcagcacgtatggaaaatattttagttattttaaaagtattagctattattttatttgtcatcgtaggtttaacagcaataaatgttagtaactatgtgccatttattccagaacacaaagtaactgctacaggtgactttggtggttggcaaggcatatatgctggtgtttcaatgattttcttagcgtatatcggtttcgattctatcgcagcaaactcagcagaagcacttgaccctcaaaagacaatgcctagaggtattcttggttctttaagtgttgctatcgtattatttattgctgtagcacttgtgttagttggtatgttccattactcacaatacgcaaacaatgctgaacctgttggttgggctttacgtcaaagtggtcatggtgttgtagcagctattgttcaagctatctctgttatcggtatgtttacagcattaattggtatgatgttagcaggctcacgtttactttattcatttggacgtgacggcttattaccttcatggttaagccatttaaacgacaaacatttacctaatcgcgcactagttatacttactattattggtgttttaattggttctatgttcccattcgcatttttagcacaattaatttcagcaggtacacttgttgcatttatgttcgtttcattagcaatgtatcgtttgagaaagcgtgaaggtaaagatctaccaattcctgcatttaaattacctttatatcctgtgttaccagcagttacatttgttttagtattgctagtattctggggattaggattcgaagcgaaattatacactttaatttggtttattgttggtatcattctatatttaagttatggacttagacattctaagaaaaatgacgtagctgaataccacccaccaaaataaaaatcaaaaaaatcatttcccatctgattaacatccagatgtggaaatgattttttattttatattaagataatcgctattaccaaccttgtccagatatgtcatattgatctaagttacctgcttccaaagcagtcagtgcatcttctatagtgtttaacgccgtgtctaattgctcatatgttattaccaatggcggttggaatcgcaacacatttcctgctacagctataataactacgccatgctcaaagcagtaattacaaattttaagtgccgcactgccatcacgtgttttgagttttttgtcggaaacaatatcaataccaatgctcaaacctttacctctaacatcgcctacactattgtatttagatacccattgatccattcgtttcctaacatattcccctttttccgcactagcctgaagaagcgactgatcttcaatcatttgaattgtggctaatgcagcttcacaactaactggattagcacctgttgtaaataaatgtgctggcgcttctaaacaattcataatctctttgcgtccaacaattgctgacataggcataccacctgctaaagattttccaaaagtgattaaatcaggcgtaaaattaaaatgcgagactgaactccatgtacctgttcgcccaaaaccttgttgaatatcatcgacagcgattaaaataccatgttcacgacaaatcttttctaacgcttcaaaataccctggaactggttctaaaagtccaccatcgccttgtatcgtttcaataacaatacatgctacttcgtcagcaggtacatatttcgcaaacatttcttttaagggtgctaaatattcttctactgaattagcttgtggctgctcgtacataccacgatatttatctggaaacggaatatgataaaaaccattcaataacggaccataatgtttgcgcatatttaaactaatagctgacatagacaatgagccaaaagttgaaccatgatatgcattagtgaaactaatgatataaggacgccctgtatatgctctggcaaatttaatgatgccatcatttgcgtctgatccggttaaatcgaaggtcactcttttttcaaaatctccaggtgtaatctcacaaagcttcttagctaaacgtaccaacggttcatgatacatatatgctggtgtataatgaataaatttatcaacttgtgcctttatcgcttctgttacttctctaggtgcatgacctacgttttgagaactcgcactcgataacaaatcgatatatgtcttcccctcaatatcaaccaatgttgctccatatccatgatcaatcactaacggataatatttaatacgtcctgatttcgcaaaataatgttcatcctcttgaattaattgatgtgctttactcatatacattcccctcccattgacagtattaatgtgcaagcaaagtggcctctcttaaatcgattataaaatccgatttaaaatactgctcaaataccgtcatgcctctatgaatactatccaatatactaataaatttcagatttgtaaatatattctgataattaagaattttatatcaatctactttgtttatgcgcataattttgttcgattagggaattgtttactatattccatttgactctgaggtgatacgaatgcgtttaaaagtattgttccatttcattgctgctattttcatatcattcatgttgctatggatgaccatgttgtttgacttaataagcaatcaatcacatttaaaagctttattattgaatttagattttctaattccttctgacaatacaccatttattctagaaataatatgtcacttactaattggtagcctcatttattttgtatttgtgttactgtttcatacttctaaaaggctttactatctatgttatatccctttatttttcttatttatagcattgtatccctttttagtatttattgcgcaacgtccaatttttcaatttagtgtgacagaattaatcggttggattattacacatattttctttatgtcattaatggcgttagtcatacctagaataaaataatatttttaattaaactgacaattatttttcacattttatacacttttcaaggtttatgacttgagaaatgttctcatttttatcatactggaggtgtattgaaaagttaaggagtggaaagtatgaataaagagcaattagaaaaaatgaaaaatggaaaaggctttattgccgcattagaccaaagtggtggtagtacaccaaaagcacttaaagaatatggtgtaaacgaagatcaatatagcaatgaagacgaaatgttccaacttgttcacgatatgcgtacacgtgtggtaacttcaccttcattctcaccagataaaattttgggtgctattcttttcgaacaaacaatggatcgcgaagtagaaggcaaatacactgcagattacttagctgataaaggtgttgttccgttcttaaaagtagacaaaggtcttgctgaagagcaaaatggtgttcaattaatgaaaccaatcgacaacttagacagtttattagaccgtgcaaacgaacgtcacatttttggtacaaaaatgcgttctaacattttagaattaaatgagcaaggtatcaaagacgttgttgaacaacaatttgaagttgctaaacaaattattgctaaaggtttagttccaattatcgaaccagaagttaatattaatgcaaaagacaaagctgaaattgaaaaagtattaaaagctgaacttaaaaaaggtttagataacttaaatgctgatcaattagtaatgttgaaattaacaattcctactgaaccaaacttatacaaagagttagctgaacatcctaatgttgttcgtgtcgttgtattatcaggtggttacagcagagaaaaagcaaatgaattacttaaagataacgctgaacttatcgcaagcttctcacgtgcattagctagtgatttaagagctggacaatctaaagaagaattcgataaagcattaggtgacgctgtagaatcaatctacgacgcatctgtaaacaaaaactaatttatacattaaacatattttttgatataaactactaaaaggactcatacatgtgctttaaaggcattgtgtatgagtctttttgattaaagttgattttgccatatgtattatagattacgcgaaaaaatcggacagctgaaaaatctataagatttctcagttgcccgattttaaatatagctattagaatttagttttcgtagtaacctaattctaagtcttttgaagtttgtttacggatttttctcattaatttttcgtcttcaattaatgattcaccgtatgatggaatcattttcttgattttaggtgcccattcagttttgtattcagggaagttacgttctaatacttctaacgcaactgaaactgaagttgaagcccctggtgattcacctaataatgcgattacagtgtggtcttgtgagttaaccacttctgtaccgaattggatgaatcctttaccgtgttcaggtgtatctttgataacttgtacacgtttaccagcagtgtataattgccaatcttcattacgtgcttctggatagaaagtacgtaagtggttcatacaaccttcttttgtcataattacttggtcaaatgagtatttaattaaaggtaagtttttaactgctgctgctaataaagttgtaatgttgtatgttttaacagacttgaataaatctaagttagaaccatttttcaagaatttaggtccaacattagcaaatggtccaaataacaatgttctttggccgtcaatgtaacgcgtatctaaatgaggtacagtcattggtggtgtaccaggtggctctttaccataaactttggcatcgtgttgttcaataacttgtgggtttgtacaagctaagaattgaccactgatagggaatccacccaaatgtttactttcagggatacctgttttttgtaataatggaatcgctccaccgccagcaccgatgaatacatagtcagttacttgtttgaatttctcaccagttaggcgatttttaacagtaacttcccattgaccatttgataattgttcaaaatcaacaacttcatggttaaattgcactgtagcatttggatgtgcttcaatgcttttagccattttacgtgttaattcaccgaagtttacatctgtaccttcgtcaattttacttgccgccatgataccagggttatcttcacggcctttcatcatcaatggaatccattttttcattacttcgatgtcttcagtatattcgatattatcgaacatagggaaagctttcatcgcttcgtaacgatcttttaagaatttaacattgtttttacctctaacataactgatgtgtggtaatggattgataaattctcttgggttctcgatgctaccgcttttcactaagtgaccccagaattgttttgaaatctcaaactcttcgttaatcactttcgctttttcgatgtcgatagaaccatcaggttgtaaaactgtgtagttcaactcacataatgctgcatgacccgtaccagcattatttctttcgtttgaactttcgattgcaggacgatccaagcgttcgtaaacgtggatattccagtctggctcaatttcttttaacattgaaccaaatgttgtgctaagtacaccggctccaattaaaacgatgtctttactattagacttagccattggtttcacctctccaaaaattgtaaatgtgtatcatcaatatgaaagttacataaaactgacatatttctttaaaatatcaacgccatagataacttcctgttttaattgatacgctgtaacaaaatactatagttagtgcttacatgtatatgttaaagcaagcagtggtaaatgtaaattataattattcattaactttgcaatatattaaatcttttattcatagaagataaatatcaaatcgatcataattatttgacaacaaatagctaacgattgttttaatctacatttggattatagcattttaaacctatactctattttgatacaatataagtgtaaaatcaatcataaaaaggagattcaatatctgcatccaagaaaaacatcacaattacctttaatattgaaaactattttgaatctttcacttataggcattgtgattatcgtttttacacatgctgagtttcaacttaatgccggtgatagtaatgtgtttttattaacatgggatattcgaggtttaacatcttatattttctcattcttaatactggttgcgcttgtttctaaactaattttaatatttataactagacgacaaagaacatcataaataaacaagcagtccagtgcgtatcatcataccttacgcattggactgctttgctatgtttattgattgctatctttttgttgttgccatttttctatttcagaatctcgtagttcaacacgacgaattttacctgagtttgtttttggtaagtcgtcaacgaattcaatctctctcggatatttatatggtgcaacttcatttttaacaaattgttgtagttctttaactaacgtatcatcacccgcagtatggtcctgtaaaataacgaatgctttaacaatatttcctcgtatatcatgaggctttgctactacagcacattctttaacggctggatgattcgttaacgcatcttcaacttcaaaaggcccaatcgtatagcctgaactaataataatgtcatctcgacgtccttcaaaccagaaataaccatcatcatctacatgagctaagtcaccagtgatgtagtatttacctgtttgcgctttcgccgtacgttctggctctttataataccctttaaaaagtgctggcaaatcaagtggtactgcaatattccctttcgtattagcaggtacgctattcccctcatcatctactacagtgaccgaactacctggaatgcctttacccattgatccaatcctctgtggtgtatcttttaaaaagcctataagcaaggtactttcagtctggccatatccatctcttacagttaaattaaagtatttcttgaattgttcaactacttctcgatttagtggctcacctgcagaaacggcactatgtaaatgcgttaagtcataatcatttaagttctgtaatttagccatcatacgatattctgtcggtgtacaacataaaacattaatttgatatttttgaagcaattctaagtatgtttcaggactgaatcttccattaaatacaaaagcagttgcgcctgaacctaatacagataagaaaggactccatacccacttttgccaacctggtgctgctgttgcccaaactaagtcatcttcattaatacataaccaatgttttggtgccatttgtaaatgtgcaaatccccatccatgacaatgtgtaacggctttaggattgccagttgtaccagatgtatatgacagaatcgccatatcatcacgcgtcgtatctgccatttctagtttgttacttgcgttttctttttcagcttcaagtgaaatccatccatctttttgaccggcaataacaaatttagttaacgcatcatattctttaattttttcaaattcaactgtgaatggctctagtgcaataactgcatttatttcaccgtgcgtgatacggtattgtaaatctttagttcttagcatttcagaacatggaatgattgcaacacctaattttaaagcagcaatatataattcatacgtcgcaatagatcgtggcatcataatgagtactttatcgcctttagataaaccgtgcgatgctaaaacattacctactttattagactgttcaatgagctgttggtaagtgactgatatatcttcgccttcagtattatgatataaaattgcctttttatctggtatgtggctatatttttcgatttccgaaataatgttatatttttcaggcgcgaatagagctgacttttgcataactaacttcctttcatacatccacttttcctgtgatgaacattgtaattttataaatgaattatatatatcatacgcctatctttacagaattttcaattaaatagggttaaataccaaagtcctcgacactacactttgacatgacgtagcattcaaggactttcaaatgattgagggttgatatctcgggctagaccatatcagctaattcaatacgaatattgtatgataattcacgattaattatttttacatctgcacctttcgaagtgccacgatgcttgtgtgtatgcttgtactcagctgaattttgccaatgataaaatgcttgcctattttcccacagcgtaataatgatatagtgtctaccagctgttctaggtcttaaaaaccttaatgctttaaatccatcaacgttttttaaatgcttattacgtcgcaaaaatttttgctcgaatgtttcttcttgtccttcgttaatatataaatgatttaacacacataatgaatcatttgataaatcatttatcgcttccaaaacatcgtaatatgcagtgtcattatttttttgtattgtgagacaatcatccagttcttctattacataacttctatattcatcataaatgttcataataaatgccttcatttcatttatatttttggtcatattactttatatctattactaattcattcccgtatttattaattacaatcatagtttggcttctttttaaaagataagactttgtaaaaagtattaatatttcatgcaaatggggacaggagtcgcccactatttttgtgtcttcaatttcatgatcattatttaacattagtcatgaaaatagccgacaacttcatctgtgaaatcaccggccttttattttagctaactttatttctgattttacgattttaattgatcatacagagaaagtgatctttttacaatttctaaaaactcatgatctatattggacatttgatgaaaataagacaaaatgttttctgttagcttctcttgttttgggaatgaatcatcttctttaatccaaatcgctaattcgcctaatggtgttttatcatctttaaatgtttgtatatattcgtaaaagctcatagtattccttctctcaatttacttatataaatcctaccacgaaagctttcaagaaaacacaattaaatgtctatttagtgaactttttaaggttgtgcactcttttaatgtctgccaattaggtcaattaatcatcacaatgtacaattaactctattttcagttcatatactcacacaccgtttttgaacaacacattaacttctcatttagataaaacgcaaaaaagcctggcaccaatacaatagatgccagactaagagcctactatataaatttatttagcgtatggttttacttcgattgcaccttcattttcatcatgaacaccatgcttataataatcaatatattgtggctctaaaggctttctgccacgtataatgtctgctgctttttcagctaacattaaaacaggtgcgtgtatattgccatttgtcgtacgtggcatagcggatgcatcaactacacgtaaattttccataccgtggactttcattgttaacgggtcaactactgccattggatctgaagcaggacccattttagcactacaagatgggtgtaatgctgtttcaccatctctacgaacccaatcaagaatttcttcgtctgtttgcacttctggtcctggtgaaatttctccaccattgaatggatccattgctttttgagataagatatttcttgctacacgaattgcttctacccattcttttttatcttcttctgttgataaataattaaagcggatacttggtttttcgaatggatctttagatttgattttcaagctaccacgagagtttgaatacattggtcctacgtgaacttgataaccatgtgcgaccgctgccttttgaccatcatatcttacagctattggtaagaaatggaacattaagttaggataatcaacttcgttatttgaacgtacaaatccgccaccttcaaaatggttagatgctgctgcacctgtacgtgtgaaaatccattgtaaaccaataaatggcatgcgcttgatatctaagcttggctgtaatgatacaggttccttacatttatgttgaatgtatacctctaagtgatcttcaaagttttcacccacaccaggtaaatgaacacgtggctcaatgccttttgattttaggaactctgaatcacctataccagataattgtagtaattgtggcgtattgaatgccccaccagacaaaatgacttctttagcatcgatggtatgtagtttgccatttttcttatacgtaacaccagttgctcttctaccttcataatgaatttcagttacaaaggcacgtgtttcaacggttaagtttttacgcttcatcgctggatgtaaatatgctcttgaagctgacattcggcgaccacgatgtacttgactatcgaacggtccaaaaccttcttgtctaaatccattcacatcaggtgttttatgatagcctgcttcaacacctgcatcaaagaatgactggaataaaggattcgttgctggccctcgttttaacttaattggtccatcatggcctctaaatttatcataaggcgctgcaccgtatgttttttctaattttttaaaatacggtaaacagtgtgcaaaatcccaagtttccataccttctggttctgcccagccttcatagtccattggattaccacgttggtaaatcatgccattaatcgaacttgatccacctaaaactttacctcgggcatgtgctactttacgaccgcccatatgtggttcttcatctgttgaataaatccaatcgtaaaatttattgcctgaagggaacattaacgcagcaggcatttggataaataaatcccaaaaataatcactgcgacccgcttctaatactaagacttctttatctttatcttcactcagacgattacctagtacagaacctgcactgcctcctccaatgatgacataatcatatgatttgtttttgttactcatcgttatgacctccaaagtttgttgtatttcaaagtgagtattgcatgaaatatttgttagtggctgattggttatcgttgaattgctaaacttagctaaccaaaacactcgattttccttttacgattgttactaacagtcatgaaataatctatgattcattttgcgtttagtccaaattatcaatcaacatttcgccacttatacaaaacaaagtgagtgtcttgtgttcttacaatggcactcaccttatctaatttttatttgctaaaccaattcactaattgtggatttgtatttgttaaaatgtgttttgaaacaaggtactcttctaagccttctttgcctaattctctaccgatacctgattgtttgtatccaccccatggcgcttgtgcaaaatatggatggaaatcattaatccacaccgttccaagtttcaacttgttagcaacgcgttgcgcttttccaatatctttagaaaatacagcacctgctaaaccatatatagaatcattcgctaattgaatcgcttcttgttcagtttcaaagccttctacagtaacgacaggtccgaaaacctcttcttgtacaatacgcattgacgtatcacaatttgtaatgactgttggctcgaagaatagaccatcttttaaatcgtctctatctggacgtttaccaccaacagcaattgttgcgccttctgctttagctacatccatataagattcgatcttattacgatgttctgttgaaatcactggtcccatttcagtatcagcatcaaaaccattacctaatttgatttttttcacgcgatcaataagtgcttgctcaaatttgtctttaatactgttttgtactaatattcttgatcctgctgaacaaacttgacctgcatggaaatatccaccatttaacgcttggtctactgccaattcaaaatcagcatcatcaaagataatgtttggatttttaccgccaagttccaaggcaatattcgtaacattattagcagcatttttcataatatgcttaccagtctcaatgccacctgtaaatgatacaaggtcaacctctttatgacctgacattacgtcaccaacttcagaacctgcacctagaataagattaattgttcctttagggaaaccaacttcttccattaattcaaaaacacgtattgttgttaatggtgtaatttcacttggtttcataactagtgaacaacccgtagcaagcgctggcgcaattttccatgatgcttgtaataacggataattccaaggtgtaatttgtgtaactacacctactggttctttaacaattttgctttctgtatctggaattggtgaatcaatcatttcgccaccgtctttatctgctaatccagcaaaatacataaacacattatgaatatcatccatatctgcatatgattcttctaacgtttttccagtatctaatgtttctaatcgtgctaacgcttcgcgatgttctttaatcttgtccgcgatggcacgtacttttttacctcttgtttcagcagtttcttgcgaccattcaccagactcaaacgcacgtcttgcagctaagattgcacgttctgcatcctcttttgtcccttcagaaaccgtaaatatcacttcttgattgtaaggattgataatatctcttgtatttttattcgcgctttcaacccactcaccatcaatatattgacgctgagataaatgttttaaaagttccattcaacaacctccgttaagtttgttaaatttttatttaacgaattttacaaacttatgttagcatagaaatgaaaaatgtgtcaatttacaaaacaactcaagaattaagttttgtaagtttgttagatttttatttaacgaaacatttaactttaatgctttaaatatttttaatgtctttttttagaaaaggttttataatgtattagtatttattttagaatgaccaaaatgatgtacggaggtgcaatgatgactcgttctcagaacaaacagcaacaattagaacaagcaaaagatattgtaattaattcaattggacagacaatggatttgtatggcactaatagaagtgtaggaaacttatatggcactatggtgtttgaaggcagtatgacgcttgatgaaatgcgtcatcaattgcaaatgagcaaaccaagtatgagtgctggcgttaagaaattgcaggaatttgatattgttaaacaacaatttacgagaggaagccgcaaacaacattttatcgccgagaaagactttttcatctttttccgaaactttttcactaaaaaatttcagcgtgaaattgacatcaatgtcgaagcagtaaaagatgctcaagctattatcaatccattacttgaaagcagtgatttaactgaagctgaaacacaagaggcacaaaaaattaaagctcagcttgatcatacacatgtttattacgaatggttagaacagttaaccgaagcgattgaaagcggtgaaattttcaaatatttcccaattccagaacagccttctgattctgaaaattaaaattgactcaaacaacgacaatgatgattatgcatgatgaaaacaatgcaataggtccacgaaataaacggtaatttctatctcaataaatagaaattaccgtttttgttttatatgacaatcaatcatggaggtattttctagagctttcttagattcgttacattgcttcgccaatttatttcaattagctattctcgccctcacgtactctatcaataatattttgtatttgttcacgtttttcatattcattttctacaaaataaactaacggttcatctttgatagtaacccaaggtacaagtacatcaaaatctaattctttaaccatctctaaactttgaatagatttttctctatcacttgaacctaatataactgtacgccatctcttcccttcaaaacatataaaatctccagtaaataagtaacggtgatgaccatcatcccataaaaatagtgtcgtccctggtgtatgtccaggcgcgggaataacttctaaatccttatccaacattacacgattactaaattgtttttgaacagaaatcttatgtttcagtgcagccacatcattttcatgtataaagtaaggggcttcaacttgattagaacctcctatagattcatgatcatgattcatcaatacttttgaaacaccacctaatgatgcaatgtcttgttgggagtcacctaagtgtccggaatgatagataacaatattacctgtttcacgttttaaaataaaagatttaaatagaaatcgattatcaaaaggcagttccgaagtaggtgtcgcatataagttttttgtgatggattctaaactgtcatgtaatttggactgtttatttttaaattgattagtcattttatttcatccttcgattaatttgaattgtacatacgcagtaccctttatttaataatcaatgagagtctttcaaacttcgatttagaatatgcttcatacaataaataagtacttggagcactaaaaaattaaatcttttagtacaacattaatgaaaacctaaaagttcatcctacaatgctactaaaaaaaggggaatggaacagaaatgatattttcacaaaattcatttcgtcgtcccagacccgctttgaattataaattatcgtcttgttcttcttctgatacttgaacgattcgcaatgaacgacgttcaacttcttttaatttttcagcacgcgtttcaagtttaattctatcgcgccctaaaatgattaaaaatgatatcatcatgaaaataaaaataacaattaatggcacacttgccagtattgaagcagttttcaatacttctaatgcacgttcgccaccaactagcatcaatgaaaatggcaataagcacaatgcaaatgcccagaataaacgattggcacgtaatggttcgcctaccacttttttctgagatgctgccgctaaaatatatgaacccgaatcaaatgttgttgctaagaataagaaagcagatactaagaatagtacaatcatcaatgatgggaatggtaaatgatgcaccacttcaataatggttgcctctgtaccatgtgtatttaaatattgtgttacattaaactgtccagaaatttgcaaatacacagcatagttaccaaaaataccaaagaataatacgcatccaagcgttccataaataattgttcctagcacgacttctttaaggcgtcgaccttttgaaattctagcgataaataaaccgataaatggcgcatatactaaccaccatgaccagtagaatattgtccagtcttgtgggaaattcgtttcttttcgacctttaataccaccgaatggttctaaccatgttgccatatggaaaaaatctctcaacatatttccgaaccctgtcactgtcgtttccataataaaaacagtcggtccaataataaatataaaggctaaaagtacaaaggatagccaaacgttgatatcacttaacttttgaataccttttttcaatcctgtatatgaactaatggcaaatataaccgtgattgttaataaaatggccgaacgtaaaatcatatttttaccatctaaaccagttaatctttctatgcctgcagaaattaatggcacacctaacgctagtgatgttgccgcaccacctagcaatccaaagataaataagatatctacaactttacctacaaatttatctgtttgaccttttaaaatcggacgacaagcttgactaattttatacaccggttgttttttaacaaatactaaataaccaattggtaatgctggtaaaacgtaaatagcccaagcaattggcccccagtggaacataccatattgcgtcgcatattggagtgcttcatcactcatacttttcgcgccatttggtggaacttgatagtaaaaagcccattcaataacgccccagtataaaatatcagagcctatgcctgcacaaaacagcattgccgcccatgtaaatgtattaaattctggtttatcacttgctttaccaagtgtgacattaccatatttaccaaatgcgatatacattacaaagcaaaaaatcgccagccccataaataaatatatcgaaccaattgaatcagaaatggcactattaataccagtgatgatatcttcacttgcttttggaaaagccatcataggtataactgcaaaaagaagtacagctactgtccctataaaggtcgtccagtccataactttctcttttttcaattgtgctccccctaattattaattttatgaatcctgtttcgatttatctcaaaatgtaataattatattgattcacaaaattgacaataactaacatttaataataatgcaaatttcatacaatttgaaacttggcaattattgaatatttatataatttttcccgtaataaacaaaaccttaatagcgctaaaacaatagtgttaagttatgatttaacgaatttaacaaattttactaggacggcatttaagaatatttatacgttattaacgaatatttatttattgtaaaacgctaccaaaaagttagacttccttcccactaaaataccacttttctctttcaacttttttaaaaaacggatatgcaacttttagtattggtatcaaaatgattgttaggtcatattctatcaatatatttttctaaagaattgcttttattaactttcaattatgtacctaacctaaaaagaagccaaggcaacgaatgttaccttgacttctaatacatattcaactaactatatattcaatcatacgcgcatgcgagagtgattgttgtacatctataatgcgttgatttaaagaacctttatatggtaaatcaggtttgaataagtgttgtataaatagaccatctactaaaacgtcaatgtatgataataactctcgacgttctgcacaatcatttgctaaatattcatataaaaatccagtccatacccaaattgtctttttatttccaaaacgtgctcgaaatgctttgacaagatttaatgtaatatccaaattacaaaatggttcgccacctaatagacttagcccagatatataatcatgatcgcaatcatctaatatttctgctaatatttcatcagtgtatttctcgccatatctgaacttttgtgaggctttgttataacatccaacacaattaaatggacatcctgatacataaacactgcatcttactccttcaccgtcaacaaagctatttgattctattttagcaatataaccttgtccttgtttaatgtctaaaagtgtcattctttaggcgctttcatatgttttactcgtgcgcaaatttctttatgacggcctttaattactggacgttgaactggattgcctaagtaaccacatgttcgtttaacgacatcaactgttttaggattatcattgccacagttcgggcatttaaatcctttttcagttgcttcaaaatctccatcgtaatcacattcataacaatgatcaatcggaatatttgtacctaagtaaccaactttgtcataagagtagtcccataccgcttctagtgctttcaaattgtgttgcaatttcggatactcacaatagtgaatgaaaccaccactcgcataataaggataatctttttcaaaatctaacttttcaaaaggtgtaacatctttacgtacatcataatggaaagagttttgataatatcctttatctgtaatgtctttaatatctccaaatctctcttggtctaaacgacaaaaacgatccgttagcgattcactcggcgtactgtaaatactgaaccaaatgtcatataattctgtccatttcgtttgataacgtttcatttctttaagaatttcaagcgtaaatgcttttgcttcttgagatgtttcccagtctggaccatagaaaacagtagctgtttcatacaaccctatatagcccattgaaatcgttgcacgtttatttttaaataactcagcaacatcatctgtttcttttaatttatagttaaatgcgccacttttatataaaatcggtgcgttattcggtacagcatctttcaaacgatttatacgataaagtaatgcatcatgtaacacatcgatacgttcataaaagatttcccagaatttcgtcatattaccggcagattctaatgccattctaggtaaattaagtgtaacaacaccaagattacaacgaccattattttcaaaatgaccttccgcatctttccaacttggtaaaaatgaacgacaacccattggcgctttgaaatcacctaatatttctacgagtttgtcataatttaaaatatctggatacatacgtttcgttgaacactttaatgctagttgtttaatgtcatagttcggatcttgcggactaaagttggttccttttttaattgaaaatacaagtttcgggaaaatcgctgtcgtgcggtcttttcctaagcctttgatacgagtatttaagatagcttgttgaattttgcgacttaaatgatctgtacctaagccgaatcctaatgttacaaaaggtgtctgtccattagatgtatataaggtattaatttcatattctagactttcaatcgcatcattgatgtctttagtgacttgttgatcaacataacgatcaatttcagattctttgacaaattgctttgcgatatttctatgttgttcttcattatgtcgtgcatatgtactaagtaattcgtcaacgcggtcaaccgtacagccaccatattgactgctggaaacattggctataatttgtacaagctgcgctgatgcagtttgtattgattttggtgaagttacattcgcgttgcctatttcaaatccattatgtagcatatttttagcatctattaaacaacagtttgttaacggttggaatggatgataatctaagtcgtgaaaatgtatgtcccctctttgatgtgcatctgcaacgtgctttggtaataaataatttaatgcgtaagatttagaaacgatacctgctgttaaatctctcattgttgaaaatgtatcactatctttgttggcattttcgttaacaatagcaggatctttagaaatcaaacccgttaatgcttcttcgatttgattcattttaccccttcttcctatatattgtgtctactcattacgttataccactatatatagtattttcaaatttttattagtctgttaactaaaacgtcacaaagttattaacatttagtgaaattcatatttctacacaattatttcattaatttttaaaattgttctcgaatcgttctgtcatttcgacatgtttatgcaactattatttcattttgcaccgggactatagtttctatttttcatacttaaatcgtcacaatgcccatcaacattgcaattactaacataacgatggcgaatccccaaatccaaaagaatgcatacttaatatacgtgcccatgtttgcctctgctaaaccaattgccaaccataaggctggtgaaaacggactgacaaatgtacctataatattccctataaccattgaataagctgttgatacagacggtacaccaaattgccctgctgtttgttcgacgatcggtaacacagcaaaataataagcgtctgtgctagttagtaaatctaatggtacgccaagtaaacctacaataatatgcaagtatggtcctacttctgcaggaatcactttgattaaattcgtcgcaatcgctttaagcataccggtttcatttagtacacctaaaaacatacctgctgcaataatcactgcagccatcattaatgcattcggcgcatgcgctcttaatcgctccatttgttcatccactgatttaaaattaataacgagcgccaatgagacacctatcatgaatgcaaattcaggtggcgcaatatttattaacatcgatagaataacagctaaagttaaagctgtattcacccattttatccatgattttgttcttgcacgtccttttacaggaaaccttacatcttgatctcgttcatatacttcaactaatttatgtacatctatatcttgtgtttgcggtaattcatttctctctattgcttttttgatacgtttctgttctttaaatccaagatataccgcaaacaacataataagaatgaatcctattatttgaataggaattaatccataccataattcattgacacttttggcttttaacactgcagctacacgtgccattggacctccccaaggtaccatgttcataatcgccgcgcttaatgctaatagtaaaatcaataaatatttattcatatttaacgctttatataaaggtaataatgcaggaatagaaagcaaaaatgttaccgcaccggccccatctaattgggctattgtgccaattaaagctgtcattgcacagacaatgacgacattgcctcgtgtcattattattaagcgtttgacaagcggcttgaataaaccactatcgttcatgatgccaaagaaaataatagcaaagataaacataataacaacgttgatgacttgatctaaccctttagcaaaaaatccaaccaaatctgtcacactatatcctaaaatcattgcacctaagcaaggtatgattgtcataccaacaactggatttatctttttggcaatgagtaaacctacaattgaaataataataatgagccccattactgttaaccacatattatcactattcatattattttctccctccacttttaatacaatttacataatccccctctttaacttaaatattataattaatataattttttatatttaagttatctcattttatcaaaaaaatcttttttgcgtaatagttaattcggttatctaatttttatgcagtatctctaatgactatttgaatccaattgattaatttgaatcttttcataagtatcatttttaatagcaatggttgaattctcggttctattacacaaaaaaactggctaaaattagctattattcatagcaacttcaaccagtttttctaataacctatatatttattaagatttttcaaatcgtctatttctctatgttagaaatcatcttacatatgtttatcatcttcgcttagaaattattagtatgcatcccatcttcatttacaaacagacatgttattacttcaagactgcctttagacggcacacagttattattttttatccaaccacgctaaaaattgagcttgtttagtatcgtttataaattctttcgtcactatttgtgataacaattgctgcttttcgctgtgattcatatcaagtaactttattttctgtcggcaagtatataaaaagtcgatatacgaactgtatgatggtggatataacgcctcaagctctgccataattgattttgtcaacttaggactcgcaccatcagttgatacactgatagttagcttgtcgcggtgtagtgcacttggaaatacaacattgccatttgatgcatctccaacattattaaaaagggcatgctcaggtaaggcttgttttaccgcttcattgacacgtggctcattggttgctgcaataactagatacgcgtctacaatatcgcttggttcaaactctttttctttccatatgacgacacctttatctaccatattttgaagtttttcagtgatttcaggactgataaccattatgtgttcaacgtattgacttaatgtttgtgcccgacgacttgcaacgaggcctccaccaactatgacgacatttttatttgttaaatctatcattaatggcatattcatgttgagcaacatcctttatatctttttacgtcatttcatcttaaaacatttaacaccaatcgctaataaacatcacgttgatagcgttgttgctgtttcatttgacgcaatatcgtctccgcttcttcttgagaaatatgacgttcttttaccaatacatctttaatggcttgatggacatctttcgccatacatttttcatcaccacaaatatagattgctgcgccttgctcaatccattcattgaaacgttcactttcttccattatacgatgctgtacatattctttgtgttcttggtctcttgaaaatgctaaatctacgcgtgttaagtttccattttcaagccattcttctatttcttcttcatataaaaagtcagaactacggtgttgatcgccaaagaacaaccatgttttcccagtcataccaagttcttcacgttcttgtaaatatgctctaaaaggagcaattccagtacctggtccaatcataataaccggtatatcttgcttcatcggaaatttgaagttcggatttttcttcaaataaattggtactatatcgcctggtttaattcgctcagcaaaatgaaccgagcatacaccttttctctcacgtccatgtgcttgataacgaaccgtaccaacggtaatatgcacttcatctggcgttgccataaaactactagaaatcgaatactctcttggtggtaattttctaaggatttgatacatattctcaggttgtaattctatagttggaaaatctgttattaaatctataaagtcccgatttataacatattcacgcgcccatgactcatcttgaatacgttcagataattcttcattgtcaaaatagatatctgcatttttcaataatggcaatgttaatttagtaaattcaaaatgtgatgttagtgcttcaacaataggaactgtatcaccatgatcattaattggcaccggagattgcggatcccaacctaacatggatattagtttttcaaccaattcagggtcgttttgcggtaatgctactatacaatctcctggttcatatgattcactaaaatcatcaagtaaaaattctatatgtcgtgtttctttatttgaatcggtaccatttaaattgatattcgctaaaacttctgcttggtatggatttaatttagaatatttcttttctttggcagacttaattgattcacttatcaccgattcactttgaataccttctgatgtagtatcaatcatattaatgatgtctgccatccacttttctgcgtcttcttcataatcaatatcacaatctacacgcttacatatacgctcagcgcctagattttctagtaaagcatctacatctttaccagcttgacagaaaaattcatatgtttgatcacctaaagctagtactgaatatctcacatgatttaaattaggtgcgttatcgtcttctaaaaattcaaagaaatcccatgcattatcaggcggttctccttcaccatgagtagacgtaataataaataaatcttctaactgcgcgatgtttgtcgtatcatattcatccattgacatcaaaacaacttgatgtccgatatcacttaaacgttctgaaaaaatttcagctaaacgcatggcattacctgattcagaaccatatagcactgtaacatgccgctgattagcttcgatatgtggctctttattttgtaacatatacgttgttgaagttgcttgttcttctgatatttgtgattgttgccacacttctgtctctaattgttgttgattactatcacttgtcgtatcgttactattagctagtaaaaaaccactaagccactgttgttggctctctgttaatgtttgcagcagattgttaatctctgtgacttgtttttctgtaaatggactattagatgtatttaatttcaaatgttttcacctcaataaacttgaaatagatgattgactctttttttatcgatagtttagtcaattttttaatatgtatggtataaattaaaacaaacttgagttgtgtctgatagttatacttgcaaatatttacaactttcatgttgcttgaatgacattatcagtaattcagacaaaactttgattatgtcgtgtcagttattaatgcatacagtaatgcatcgttgttattttttatttatttactatttattatgtaccaaatcagcctttcagtaaaataggtcaaattactgattttctaaatataaaatgcctcctaatgacatactattagtacatcattaagaggctcttgtgttatttgcatactaagcgctcaattttaaatttaagatgaagattcttgcaataatatttctatatttgtcgatatatccaatggatcttccattggcaagaatcgatttacaacattgccttgtcgatcgattataaattttgtgaaattccattttattggggacccaaagattcctggttgttcattctttaaatgcgtaaataacggatgttcatcgttcccgttcacagatattttagctagcactggaaatgtaacaccaaatttctcacgactaattttcaagatttcttcattagaacctggttgtcgattgtcaaaattattattcggaaaactcaacactacaaacccacgatccttatatttttgaaacaaagtctctagttttttcaattgttcgctatatatacattctgttgcagtattaacaactaaaatcactttacctctaaatgcttctaatttataagttaagcctttataatcacttacttcgatatcatacacatttctattattcataagacacccctacacagccttttttatattgaatatgttctttttagaatgttctgataaaataagtgcgcgtttacaccgcgaacatacattatatagcgtgatacatttttcgagcacacgataaataatgttcgagtttatgttgttgctcaacctatccgatttaccgtcttttttcacctgtcttactttattaaaataatcacattgtatagctgtattagtccagctacaatatctttcgttataacccctcattataatcatccttattttctatttttaaaaagacaattagaccgctctttaaactatagattaatacttaagttaaactcatacatactgataccatacgttagatctaacaatttaaaattcgttataactatggattaaagagctgcccaactcatataatccttaaaaacttcacatgtgattgtttattaagccctcctttatcttattaaatatccttataacccttttaaaattaaactgacacactcatacattgttacacgcgacgataaacgtcatattattgcatatcattaaaacaagtcactttgtatcgtgtgcgaccgaatacatattaaatcatcaataatgattattcaattattaaaaataaaaacgaacattctatatagagtttctacttattgttttttcatcattgtctacattacttaacattcgtgtttataagtaatattgaccgccaatatttagacactttataagtatgccattcatcatttttaatcatattatttttcttattgatatttctattcatatatttctgattgtatatttagatataataatttgttattggaaaatatatgaaacaaatttgactcatctttttcaatatctaaatgacacgatgcatgatttttgaattttgtaattaacttccttttaaattagactgaattatgacaattttcaaacattttaatgtgtaaatcattggcaaaatatacgaattgcatttaaatcgtcaatttacatatatttttgcgtagtaatcaatcgttatcattgttatttatcgttacattatttcgagtatcagtatgtatttcgggcttcgtttgataacgacatttctttgtgacatcgcttcatcagtgtaacaacaaatacaatgatttcgtgatgttagttacccattttatgtgttgcataaaatatgttgttataaaacattttaaatcattttatataaacaatctatatatttttggcatttccaaaatatcacttgttatattaaaaaccgacaagacattttatcttatcggttgaaatttgttattgttatttgtaatgtttttaggtttctttttaatataatatatttcagtgaaaatacatgattgattgtgatttcactgaaacatggttaattgcgttgttgatgaataactttagcataaatataggaagttattttgtacatcgccatatatagaaacgaaattataatgacagctagtacgtaacttgttaaaaatatatgatggttattaatacctatcatatttagtaacgtatatacaatgttactagaaattaatgtgtgaatcagtgctactgttattggtattgcgaacaagaaagtcatttgatttcgtgttatctttgctattcttccattatctaaaccaagttttttcataatgtcataattgtgctgatttgcataggcttctgaaacttgtttatagtacatcattagaaatattccaatgacaagtacaattgatactacgccacctacaaatattagtccacctgtcaaacgatcccaaaccattagcatttctgatttagaatttattgacgcatcgtattttttcgatagcttttgtatttgtgatgttgttaatttcgtctttccaaatacattaaagtttatcgatattgtcgaattcttttgttcatgtgcataaaatccttttactttttgtaattgattgttatctttaacaattaaaaccatactatcttgaatcatcatcaaatttaacgcatgtgcgtcaagttgtttcactttaaagacttcattattaagaccgaccttagactgctttttaaaaataggtacattcgtaatcatacctatactttgattgtctaagtgtaatttgttttggtgatatcgattataatcttgtgcagtaaaagctgtaatcattactgattgtcttgaaaatatcgcgccttcattaccaatgaagtctattggaatatcatcactagcctgttttaacttgtaataagcacgattcttttctaaagaagctctaaataatgtcgtttcatatactttgaagtcttttgcattaaccgaaccctgtatatcacgtttaatattctcaattgtttgttgacgttctatttgtgacttagaattgtcgctaaatgacaaatcataatcattcgtaatcaatttcgtaatggtatgattcatatcacgataggttgttaatgtcattgtgagcgttacaatcaaaaatgtacacagcaaagtgattgttgcaagactgactgcattcattttaagacgtacacgcatcccaactaccacaaaaaaataccgtggatgatagtaaacttttgatacctgctgcaatatactaataattatttcacttatacctacaaaaaatgcataagtaccgataataactaatcctatgacaatccatattttaaaaaaggcaccaaacgtcgtatcttgttgtaatgcaataaagtagcctaaatatagtgctgcgcttcctataacaattaaaacgtaacgcaaccatcgtgatatgacactagaatcggaacgatgttgataagttatcggccgttgaaaattaatactgaacaagttgaatataagtagcatgcccattaatacagcaatgataatcaaagtaataaacatcgctacaaagtcaaatggataataccttaacgtcgcaacttcactgcccattattttctgtataaacaagaaaaatatcgcaccaagtaagtatccgccggcaatactaacgactgaaattattataaattgtaagatagtttccattactacaattaaacgcatacttttcttggtcatgcccaatgtcataaaaatgctaaactcttttcgtctttgtgacatcataaagtgatttgcatagaaaataaaaataaaagttaaaagcgccataaaaaaattagctatgataataaatggtactaggaagtcattcttctgttttatgtagctatttaacccaattgacacaagcgtatattcaatcatgaatagtacacttaccgctaaaatgaatggaatgattacaagtcgctgcgtaataaattgacgtcgcactatgtgccataacaatcttaacttcatatattgacacttcctccattcacaagtgctaagctatctgttattcgttgttgaaaagctaattgactttcttcgccacgatatatttcatgatatagacgcccatctttaataaaaattactcgctctgcataagacgcatcgatatttgaatgagttaccattaaaattgtctgttccaattgatgaatctcttgaaataacatcatcaatgcctttgatgtttttgaatcaagtgcacctgtaggttcatcggctagtaaaatcgtcggtttagtaactaatgcacgtgcaatggcaatgcgttgcttctgaccccccgagatttcagaaggatacttgtttaagaatccctctaaatgtaattgtactgccaactgatgtaccctttgttctatatcttttcgtttagcaccagctaaaattaatggcatcattatattttctttattcgtcattgttggtaaaagattaaaatcttgaaaaacaaaacctaccatttgttgacgatacagtgctttacttttatttttcatattatttaaatgtgcgccatccacaataatgtcaccttcagttagtccatcaaaagaagcaattaaatttagtagtgtagacttccctgacccagactcacccataattgcaacaaattcaccagctccaactgataaattcatttgattaagtgctgtcgtagcattcaaacctttaccataaaccttttttacatgtttcacttctagcaacatggcatgcacctcatttctttgttagttctatattaaaacaaaaaaatactaataacatttaaattagtgaaaaaatgttactagtatgcttacaatattgaaagtttttattcatctggaaattgaatcgtaaatgttgtaccctcattttgtttagatacgactgaaacaggatggtttgtgtgagttgaaatttgttttacgataaataagccaatcccacttgagttactttgacgctggccattataacctgaatagcccttatcaaatattttaggcaagtccgcttcactaataccgataccattatcttttacgtataattgattggattgctcatcaaattcaatccatatatctttacctctcgcatacttaagtgcattatttattaattgttctatcagtaaagaggtccatctaacgtcagttaatacttcgtgatgacaaggttcataatggatttttgttttttgatcaataaactgtattgaatatttcataataattgggcgaatgatattgttaatcgaaattttagtgacagaaatatcagaagtttcatttaataactttaaataactaagtgctaaacttgtatagttatcaatttgaataacctcttgacgaacacgattcacaacattaggctcatctctttcaagtaacagttgtgctgcagtaatgggtgttttcatttgatgtacccatgttaaaaagtagctctctacatcatttttatattcaatttgttcatttttaagctgatacaacgcattttctaagttttcaatttgttgttgttggcttatagtttttacaaaacttaaatatttaatacctatgaatatgagtaataataataaaataacgccaagtgctagtaaatatgcttctaatggcaaatgatacaggtaaaacattaagccaaataaagcaaaaataactatgactattgctatttcctgagtaatacttttaagaaaggtcattgcattcaccctatactttatatccgacatttttctttgtaataataaaatcattaacgccaatagtatttaattttttacgcaggcgcgtcatgttaacagctaatgtgttatcatctatgaagttttctgattcccaacatttttcaattaaagcagttctacttacatatttatcttcattttgaaataataactttaatatttgtaattcagtcaaagatagctgtatgttttgttcttgatacacgacttttgcttcatctaatattaatgtacaacctttaaccgtcaatgaatcattagctactgacaagtcataagttcgtctcaataatgcttgaattttggcaatcgttaatgacaagttaaatggtttttcgataaaatcatctccccccatttgtattgccataatttggtccatattatcaatacgggaactaataaatataattggcacattagatgtttttcggatttcttgacaccaatgaaaaccatttaacgttggcaaattaatatctagcaatacaagctgaggttgatgttggttaaagatagacagtatatcatcaaattgttcaacgacaataacaccgtaattccattttttaagttcagatgctaaactttctgctataacaaaatcatcttcaacaattaatattttcatctataatcttcttccttcaattgaattaccctttgttatctttttgttctttagcctgttgcaatgacggctcttgatttgaactttccgtgtcatttgtattttgatttagtgtatttgctttttctttctcgagttgctttttcttcgtacgtttacgctcctctaaaatagacaacactataaagaatatgattaataatggagataacattactagtatcatttttccacctcaaattatatttaattctatattttcacacgcttctattctaacgctttctataacaaattgtcatatatattcattttttgttattctaaatcactctgtttacatatttttaactaaaactacataattgctcaaaattcctcttttacactgaagacatagtcatatactcaggaggatgtcttatgttatcagttaaaaaagccacaaaatttgcagttgctaaccttattatcgtgtcaacggtttttagttctgtcacacctgcaattgcgcaatccgataaaagttctaaagatgaaagtttcgcggttggtaatactaaaaatccaaaaaatgttatctttttagttggcgatggcatgggtccatcatttaacacagcttatcgttattataaaaatgatccgcatgctaaagaaatgacccctactgcttttgattcatatttaaaaggcacaaatcgtacatattcaaatgacccaaaacagaatattactgattctgcagctggcggaacagcctttagttctggtcataagacatataatggtgccatcggtgttgacagtaacaagcagaaagtaaagacggtgcttgaacgtgcaaaagaaaaaggtaagtcgactggtcttgtttcaacagctgaattaacagatgcaacaccagcagcatatgctgcacacgtgacttctagagatgataaaaacgaaatcgctaaacaattttataaagataaaatcaacggaaagcataaagttgatgttttattaggcggcggcgctaaatatttcggtaaaagtaatggcaatttagataaaaaattcaaaaatgatggttacgaccttgccacaaacagtaaggagttatcaaaatctgataaagataaagttcttggtttgtttgcagataaaaatatgccacttgcaatagatgcttctaaagatgaaccatcattagctgatatgcaacaaagtgcacttagtaagcttgagcgtaataaaaaaggattctttttaatggtcgaaggtgcttctatagataaatcagcgcattccaacgatattacaggcgttatgtctgaaatggaaggttttgaaaaagcattcgatgacgccattcaatatgctaagaaacataaagatacacttgtcgttgcaacagcagatcactctactggtggtctaacaattggtaaagataaaggatacgaatggaatcctcaaccgattaaatcgatgaaacactctggatcatatatgacagaaaaaatggctaaaggtgaagaccctgaaaaagttattaatgaaggttatggctttgaattttcacaagatgatatgaaaaaggttaaaaaagagaataaaaagctaaaaagactacttaaaaaagaaaaagacgaaaaatccgcaaaagtagaaacgcaaacaaaagccctacaacacgctattcagaagccagtaaatgataaatcttatacagggtggacttccgatggacatacaggcgaggatgttaatacctacgcttatggacctagatcagaatcatttagtggtaatatcgaaaatacagaaagcgcaaaaataatatttgatatattcaagtaaagcataaaaaaattcccgagcactataacaaggtgttcgggaattttttatggtttaatttagtactcaatgttaggtgcttggttaacacgttcttggtattttttaaatgcgaagtataaaccgccaactaatgttaaaataactgctaattttttcatcattcaaactcctttctaagatgtgttgaaactgagttcaattaaattatatgtttttattatacactttttgacatattttttaaatttaagaatgcgaagatttttaacatttctgatgctagctttctttttcatctttcaaatgcttaataaaatcaaagccaggtcgccctttagccaatgcttccatcacatcataccaatccgaaccgacttgttgatatatattttgcaataattcatcttgcgccttgttcaattcagcaatgagttgatcgcctttatccgtcgaatataattttttgacacgtcgatcagtctctaaaactttttcaataatgagaccttgctcttttaatttttgaagtgttgcatgtgatccttgtttagaaatttctaatatttctagtaatgatttaatagtaataccaggtaatttattgataaaaaacaaaaaacgatgatgctgacggctcataccatacttctctataatttcatcagcggtagtaataaacgttttatatgcaaaataaaacaacatatgctcataatcgtttttattggtcgacatgatgatgactcctttcaaagcgttaacctcattataataaaatttataatgtaagtcatacaaatgatgataaaactataagctaaatctaagtttcacgagaaacatttttgcgtatcagcaaattgcgccaatcatattaatacaaatttaatttaaacactcagaaatgttagtcgtgcgtaaatagtttgtatctctcactctgtgtatttaatgcaaccacatattttccaggaaataattaatcattcaccatccatgttatagcacgcttaatcgcttggtcccaatatgcataatcatgatctcctggtccatcttcaaattgataaggaacatttttacgtgataaataatcgataaaatctaagttgtcttgatataaaaagtcttgtttaccacacataatgagcaattttggaatttgtttatcttcagctacagctttgtctagcaaataatacggatcatgttcagttcctttaacacttgaaagattgccaattatggcctcttttgaaaaatcattccactctagatccattaaattttgcgcttcaaacacagcagataatggtacagctttggcaaatttatccccttgtgttaatgcaaatttaattgtgccatatcctcccatagagtgacctgctataaaattgtcatcacgctttttggaaagtggaaatatttgatgaacataatcatatacttccaaaatataatcataatagctatgaccatatgccatgttagcatatgcgctatgatccacattgggcataatcacagctaatttgtgttcattcgcatacctttctatgcttgtatatctcatatatgtcgtttcatcacttgataatccatgtaacaacattaaagtttttaatggtttagcagttatatcgttattaaagaagctttgatcttccggtaaaatgactgtcaaattttgatgcataccaattgttggtgaatgatagtttaatgaaatataagccatacgtcatgacccctttctaattctactctatcaacattttacgcttaatcaattcactttaaaatcattttcaacaaaaaaaccgaatacaaatgtattcggcctaaaaaagtatttacgctttttctttatgatcttgcttgcgttttctaaacaatagtaatgatcctaataatgccatcattgcaccaaataaagttgcatttgtgttttcgctcttatctcctgtttctggtaaagcatcagttttgtgttgttttgataccttattagaatggtttacttcacctttaggatttgatggtgctttctgttcattatttggtggtgtaactcttgaatcggagtcactatctgaatccgagtcgctatccgagtctgagtcgctgtctgaatctgaatcgctgtctgagtctgaatcgctatctgattctgagtcgctgtctgagtctgagtcgctatctgaatcgctgtctgagtctgagtcgctatctgaatctgaatcgctgtctgagtctgaatcgctatctgattctgagtcgctgtctgagtctgagtcgctgtctgagtctgaatcgctgtctgaatctgaatcgctgtctgagtctgaatcgctatctgagtctgagtcactgtctgaatctgactcactatctgaatctgagtcgctatctgagtctgagtcgctgtctgagtctgaatcgctgtctgagtctgaatcgctatctgagtccgagtcactatctgaatctgactcactatctgaatctgagtcgctatctgattctgaatcgctgtctgagtctgagtcgctatctgaatctgagtcgctgtctgagtctgaatcgctgtctgagtctgaatcgctatctgagtccgagtcactgtctgaatctgactcactatctgaatctgagtcgctatctgattctgaatcgctatctgaatctgactcactgtctgattctgagtcgctgtctgaatccgaatcgctatctgaacctgagtcgctgtctgagtctgaatcgctgtctgaatccgaatcgctatctgaacctgagtcgctgtctgaatccgaatccggatccgggtctgggcttggttctggatctggcgttggttccggatccgggtctggacttggttccggttctgggtctggacttggttctgggtcaaccggtggccctggagttgggtctttcggatttactgctgaatcaccatcagcacttccaccaccataacgtacaacattctcattattccaaccgaaaatactgtagtctttacctgtcgctgggtcaacattttcttgaatgacttgcgttttcaagtttttacctgttttatcataatgaccttcgactaaaacgacatacgttttatttatatcaccaaaattaatacttgctacattttggtatttataagtgattttatccttaaattgatcagttacttctttaagattagagtcatttgggtctgcatagtagctatctgataatttagatgtatcattcacttcaaaaattctcagttttgtatctgtagcacttactttaccgctactttcttcgattttatcttggtaacctttaatatacacccacgtattacctaaaactcgttgcttagggttaacaaataccgtttgcttgtatgtattttgacctgaagctgtatctacaccaataatttgagaagaaatgttcgcgccatttggcttatcaattcctgcaattggcgaactatagttataagtaattttattattaaacatttcatccgcaatattaatatttgcatcatatgttcctgatttaggtgcctttgctctgtctgtaaatagtggtaatgaaaatttcccattaatattttgcttatcatttacataatctgtaaagacaaatgtatatgtcttagtcaaaatatcatatgtcgcttttgctacaacttcatttttatcgtttactatatctgcaattggcatcgtattattcgaattagagtaatccacgtctccattaccagttacactatctggtaacttcgctgtaaaataatcccctgatttcacttgtccagtcactgtaaagtttgccgccataaaagtattaccactttggttagggtcaaatgtagtcttttctaattgaaaatcttttgccgtaactttatcatttacatttgtacctttagcatcagcagcatttactacaggttcagcaactgcaagactacgtacagctctcgttctaacacttggtttactagttccttgcgcattggaaattgtttgtggtgatgattgtggtaaatctaatgtttgaggatttttaagctcactgtttgtcgctatgctattagcatcattcgttgttttattatctacttgagaatttgcttcttgaggaacagtttgatcttgcatttttgcagcagttgcttgatctttaattgccgtcagttgaggtgtttcatttgttgaagctggctctgttgtagtggtattgctcgtttgtgtagacattggttttgctgtgctatctacattcgcactgtttgtgtttgcactaatatcagatgtatcattagccgttgtatttaattgaggtgtttctatcatattgtttttttcggaatctgcacttgcattatttttcgaagattgcgttgtatcgttcgattgttctgaagcttgtgcttgatgattgcctatcccaaatagtatagttgcccctactattactgatgtggtacctactgtaaaacgtctaatcgaatacttattctgcttattcgacaaataatcaattctttttttcaaaaatattactccatttcaatttctagattagtctaaattgtataatgaaataagaattatatcaattgcttttcgaaaaaaattacgtaaaatttgttttcttcctatttatataacttaaaattttctgttaactagcaaaaatcaatataccatttttacactattgcaaatgttttacttttcaaaaacttagaagttctaaatttttcatcaccttaaattttactgtaatttcaacaatcaaatttaactaacattttaaattattcatcatgctagcaaaaaaggcctaacgtataaatgtacgttagacctcatgttcaacttattcattttacattgtatattaaacacatacatcattgaataaatgtttgcttactaaccaatttttatgatctttaacaacaagtttttcatctttaagttcatgaataatatgaccagctgtttcccgggaaatcccagccatatcactcatgagttgaatagttaaaaactgtttgatttcataaaattcatcttgatcgtaccctactgtctgacatagatgacaaaacaatttaataattcgatctttagcaaatttacttgttaatgccatgttatagttcatgtgttgctgctcattatcatttattaatgcaaaaagtgtcaaaaatatatcatcattagctttgcacaaaaaggccatcaattctctaggcaatccaagaactgtacaatcggttaatgctgtacacaattcgttaacctctttcggatgaaataagttactgattggaaataatacttgctctttattaaaataacgatatacatctccattttgattgtaatgttctctaataatgttaccttcaattaaaaagtaaatattgctactttcttgtggcgaaaaataaataacttggcctttcgtataatgtctgacaaaacattcactttgatatggttgtaatatactatatgggatattaatgtaatctgctaatgcctttagttcatgttctaatttattatttctacccaaaataaagttttctgtcataagttaaactccttcaaaccttgcaaagtgtcagcagacaactttttcatttgaatcaacggagaaacatatttaatgttttgtcgcgtgataaagtgctacatgtgaatgtgtgtacctttattaccaatcaaagcttcgtatgcctgctctaaattggtaatgataacttttttgttttccccactttcaacaaatcgtatcgcagcttctatttttggcaacatcgatccttccgcaaacttaccttgtgccgcgtattttttcagtgttgctacatcaatatcatcgatttgttgttgattaggttcattaaagttaataaatacattttctacattcgtaagaatcattaaggtatctgcttcaatcagcgttgctaatttctcactagcaaaatctttatctataaccgcttcaacaccttcataggtattttctttttttataactggaataccgccaccaccgcatgcaatgacaatatttttaccgtctgctaaagttcgaattaactggtgttctagtatagattgaggtagtggtgacgcaactacttttctataaccacgtcctgcatcttctttaaagactgagtctggctgttctttttgtaattcttcaacttcttctttcgtataaaaaggaccaattggtttggttgggttattgaatcgtggatcatctttatctacttccacacgtgtaacgattgtgcctacagttctatcactattcatttcagttaaaatgcgattgatttcagtttccaaccaatagcctatcataccctgtgacattgcaccacaagtatccaatggcattgccggcgttgtgtcactgttcgatttagcttgttggattaataaacttccaatttgtgggccattaccatgtgaaatgacaatacgcgctggtgaatcaaataaaggtttaaggttttgcatcgcacgtctaatagctgtttgttgtgcttcagctgttgcttcttttgtctgtatcgcattaccgcctaatgcaatgacaattttctctttcatatttttgtcgctccttttaaaaaacatttatcgttcccatcaataacttaattaatccgataactgcaagtacgataataatcataaaaagaatatagtctgatttaatcaaacgtgtctgattattcttttgaacgattgaataaacaagaagagctggaatataaagtaacatcgtcaataataagtaattgatacctgctgcatatataagccatatagcataaattgaggctatgatgccaatcgtccattgcttagtagttgcttgctgtcgatgctctaaagtgtatttaacttggtaaaatgcactgaacatgtaagggtataaaatagcacttgatgctagtgaaaatgcaaattgatacgcactctgtgtaaatagcatacttattaaaaataattgtactaatatattggtaataagcagtgcatttacaggtgctccatttttattttctttagcaaaccactttggaaataatccatcttttgcaacaatgaaaggtaattcaccagcaagcaatgtccatcctaaccatgcacctagtaccgaaataattaaaccaatatttacaagtgtagatccccaaccacctacaatagttgcaagcacctgtgccatacttggcgaatctaattgagaaatatgattttgcaaaatcacgccttgagctaatacagttaataagaaatagataattaaaactgatataagtcctataaccgtggcactacctacatcttttttatttttagctctactagaaaaaattactgcaccctcgataccgataaacacccaaactgtcactagcatcgtacttttaacttggctcattgtgctcgcccaactaaatggcaatacaccctctgacgtcataccgaaaaagcctgttttaaaagtgtcaaaattgaatgcaattatcatgcatatgattacaagtaaaatcggtattaactttgcaacagtaacaatactattgataaatgctgctgtttcaacgccttttaaaatcaagaaatggacaccccagagtagtaacgaggcgacaataatacttggtaatgtgttgcctcctttaaaaatcgggaaaaagttacctactgctgacatcaatagtgttgcataggcaacattgcctaaaaacgctgagaaccaatatccccaagcactgataaatcctacaaaatcgccaaatcctgcttgagcataactataaataccaccgtctagctccggccgttcattggttaaattttgaaatacgaacgctaatgaaatcattcctatagctgtaataatccaaccaataataatggctaatccaccggctttaccgcccatatcagacattatattgaacgcaccgccaccaatcatggatcctataactagtccaattaaagaagatttactgagtttgttatctcctgattcgttcatattcatttctcctttaataccaatatgaggtgtctgtacatgacacttatatcatcagacacatcatattcatatcgttccatttagtgattaactccccaatgttgctgccattactgccttaattgtatgcattctattttcagcttgatcaaacacttttgaatgttcacttctaaagatttggtctgtaacttccatttcagctaatccatatttttcataaatttcttgtccataaagtgtatttgtatcatggaatgctggtaaacaatgtaagaatatcgttgaatctttacctgttaaatcaaacatctgttgattcacttgatagtcttttaataaattaatacgttgttcaaattcactttcttcacccatcgatacccaaacatctgtatatatagcatctgtattttcaactgcttctgcaatattatccgtaatcatgactgaaccaccatattgactcgctttttcttttgcaatatcaacatatgcctcttttggatttaatgatttaggtgtacaaattcttacattaacacctaacatagcacctgctaccattaatgaatgcgcaatattattacgtccatctccaacgtaagttaagtttattccttctagatatccaaaattctcttttattgtcataaaatcagctaacatttgtgtaggatgccaatcgtctgttaatccattccacaccggcacaccagagaacttcgctaaatcttcaacagcttgttgtgaaaaaccacggaattcaataccatcgaacattctacctaatactttcgcagtatcctctacagattcttttttgcctaattgaatatcatttttccctaaaaattctggatgcgcacctaaatcaatagacgcaactgtaaacgcagcacgcgttctcgtcgaattcttttcgaatagtagtgcaatattttttccagataagtagtgatgcttaataccgtttttcttatactcttttaatgtaattgcaaaatcaataagtccttcgaattctgctttggtaaaatcactttcttttaataatgatctgccttttaaatcatacggtttttgaatttctgtcattattttcaccctcgtttctataatttattacgttaaatgtcttctctgaataatggttgactcatacatctagggcccccacgtccacgtaccaactcgctaccagatatttcaatgactttaatgcctttttgtctcaataaatcattcgatacatagtttctatcgtaagtcactacaacgcctggtcttatacataatgtatttgagccatcattccattgctctctagcaccatcaatgacatcaccatttcctgttggaatgaattggatatcatctatacctagtacgtcttctaaagtatcttttaaatgactagattgtttgatggcaatatctttatttacgtcatcatattcaataataaatatattcatattgccttctgcctttaaaatggctgaatgcattgtaaatttgtcataatctatcattgtaaatactgtatctaagtgcataaaagttcgactagttggaatttcaattgctactacttttttaaacgtcgcctgcggattttcaaaaatacgtcgcgctaacttttcaatagcttgtgcagatgtacgttctgaaacgcctatagccaagacatctttagataaaacaagttcatcgccgccttcaatattgaatgggcaatctcgatctaaccagattggaatattcgcatctttaaatctaggatgatgctttacaatatattgaataaatattgattctcgtcgtcgtgctctccagaacatccgattgattgttataccgtgtcctattgaggcttgtggatctctagtaaaataaaggtttggcattggatctaaatagaatggatacttatcatccatatactctactagatgtgtacatttcggattaatttcttccttacgtacccctgacattattttatctacaagttcttgattagaaagtgtcgcaaataatgccttaatttcttcttcatgacctaatattgtttttttagactctgctaatacatcatcaataaattcacttcttacttgaggattttcaatactttcagctgctaacttctcaaggtaaagtacttcaacaccctcttctcttagcacctgcgcaaaatggtcatgctctttttgagctacttctaaatatggaatatcatcaaatagtaatccatctaaataatcaggtactaaattttctaattcttttccaggacgcttaagtaacacagtttttaaagctccaatttcgctatttactttaattggaccatctgtcatgtctatttcctccttttatctttgaattcatttagagtatagacaatcttcaaacgcttacatgtgattatattcacataaagaaagtcgaaaatttcatatctttttgttatacaatacataataatggatttttatacataaataaaggtattttgggtcaaaatatacattttttattcaaaaatacccataaaaacatgttgtataaagttttttatacagtcaattgaatgactatgaattctttctttccataaaaaaacgcgtacacaagttaatatttggtaactaacttgagtacacgtgatacgaaacaaatttttattattcatttgatacatgtctatttaaataattttgcatatacgtattctgccatatcatttgaggcagttaagattaatgtagtgtcatttccactcaccgtacctaatatctcttctatatttagctgatcgataaaatagtttatgccttgggcgaaaccaggtgaggttttaacgataatgtatgaaccattgatgattgaacttagaacttcatgttcacaatagtgtctaaacttttctctcatctcttgttctgtttgattattaatagctttataaatccatgtttcacaatcgatagggacacgatatatattaagttctttcaagtctttagcaattgttgttgcactatatcttacaccaaaatattcttcaatatatgaaatgatttgttcttttttataaatcttatgctttttaactattgtagaaacaatttctaatcgtttacttttcttcatattgtaaactcctttggtagttacgtttcttgtattaaaaaataaattcatgcatgtttcatttataatttaacactttgttttgcaaaagataataaaaatacatgtaaattttttgtgacaacttttaaaatgaattttgtattctaagtcagcatttaattatcacatatctactacttgtaatgattttagactgccgagtagtctttcggcagacaaccctcacactcctctcatctaattacaaagagagggtatacctacaaagtcaattatcaatgtaggtataccccatatataagctgtatttaaaatttaattatttataagtgtttaacattacttcttcttgtttatatatttttactccacgcctacttcattccatgcttcatacacctgttcagctgtttgctcgtcatataaatctttggccgcttggtataatgcatctttacaatctttgaagtttgaattacttgttaagtattccgttaatgctcggtagtaaatttgttctgatttagatttccctattgcttgaatcacgttataagctgctttatttggaattccagaattcgtatgtacgccaccattatctttttcagtgaatacatagtctttcatatgagctggttgaccaaattgttctgggtttgacatgctgcgtaaagcgtctccctcttttccaggtgtgtagacatcttcacccattaagaaatcctcgtcatctacaaagtatccaaaaacatctgaaaagctttcatttagagcgcctgactggtccttatattctaagtttgcagtctcttgtgtcacaccgtgtgttaattcgtgtgctactacgtcatttgcacccgataaacttgtgaatgtgcgaccatcaccatcaccatagatcattttgtcaccaatccatgcggcattatttctgttatcttgaccaccgtagttattaacatgcgttaatgaaacaattggactaccttggttgtcatatgattcacgaccaaatgtgtctttgtaataatcatatgtttgtttagcgtaataatttgcatctacgccagcacgttgctcatcttttacgaagttttcatcttcattagtaatcaatgttgcttgacctgtttgatcattaaagctaaatgctgataatttaccttgatgcgttaaatcttctaggctaaatccaccgtcaatactattgatattgatatcttttgtatcgccaagtacaccttttcctttaccagtttctgcagcttctttaactaagttcattttttctaaaatttcgccagtttgagcatcaattttaactttccaatgtgaaatttctggtgtcactgtaattaactcaacattataaacgtatttattactgtcaccatcgatttcaactttgttttctttaatgactttatctttaagatttttcgctttattcttatcaatcttaactgctttaaatgctttgtcggctgcgtcatctttacttaatgtcactttattcgttggctttactttcttcgcatcagtatccccattgattaaaacgacttttcctgatttgtctgcgtgtactttcacttctttgtcaggtgcatgaacaccatcaacactcggttgcaatgtataatgcgtaaatccttttttatcagtttttacatcagtaacagcgtaatcttgataaatattttttacattttcggatttaggcaattcttttaatgctttgaccgcatcactcttttgagtcacctcaaatttaatatcagaattagctggtttattttttgaatcaatcgctaatgctgctggtgataaagtgctcaacaatgttactgctgccatacttgtaaatgcatatcttgaaaatttcctcacatttcattcctcctgaaatcttaaaaacagcttataaataaaatattaatttaatttttcagaaaagtaaatgattatttctatttatttcgatactttttgttcgttgattttatttattgattcttttcttttttaaaaatgttatctgtaactaaataaaattttaaaaattgagcttaattatattttaaaatttatcaaggctttatttttgtgaaaatattaacaaatacaaaatagtgctctatacacttaatcaatgcttgaaatatgtgagataactatttaaataatcatgatcaaataaacatttttatcaatttcaaacaactatgtaagacgcaataatcgttattatttaataaaaaagactagaatgcggtatctcccctcacactctagccttaatatgccattattttatttacttgttttgtatggtgtatgtccaactgttacttcgacaactctattatgatcaacgacaaaccagatgcctaatgtctttttagcattttgatagtaaaaaataccgctatcagcttcctttgttttaccattttcttttttcaagtccttgccataagctttttggatatcttttaatgaaatattatttttaactacaaattgcaattgacttgcttcgtttccttttgcagaaacacctttaaaagtttgatcatatttctctactttttttatcgtattcgttttagctaatttaataccattgaatttcacattatcatacttaatcgcgttaataaaattcttatccagaataaaattagcattattaccaatataaccattataagtataatatggggttattgctgcctgtgcctgtttacttgttggcgccgaattttcaacaactgttactccaatcagtgtgcccaatgctaatgttgctgctacacaaactttactggttttattcataattatctctcttttccatacaaatattttattccttacacttttattataactttttcagccataaaaatactaatgattatatttataaatacacaacagttttgttatactaattgaagtacacaaaaaacaatgaaaatattaatatcgcctacttttctaatatttattttttaaaatgattatggcaatattgaaataaattatttagcttcacgtatcaactacttttcattaacatggaggcgttatatttgaaaaaacttcttattaccatcgtaattatcgtattaatcggagcacttgggttcgcaatttatgctgcaataaatcattctacatcatcaagtaataaccaagaacaagaaaataaagctacgcataaaaagacagaaaccgaagaaaatgatcaacaagatgatagtgcagacaaagcagataaaaatcaaaataatggcaataacgttactaatgacaatcaaccatcttcacagtcaaatgttcctaacaaccattcaacagcaccatcgaatacgcaaccagctcagccaaaagactcaaattcaaataaaaataatactcacgatggtggtagtcaatcgtcaacaaacaaccaaaataatcaacaacagaacacaccacctgctaataaatcaaataataccaatacgtcttctaaacaaacacctcaagcacaatcacctaaaaattaatcatttacctgatacgtccacaagtatcaggtacataaattcagaagaacagcaatatgatatttttctatttgaaatatcttactgctgttctttatttgcataattcgcactctgttaaattcatataaaagttcgctttaatgtcattgacgtatgtataagctctcatgtttaataatattaatacacctttaaaaacgcttacacggaaaatttagaaaggaggtacatgttaaatgcttgatagacacttaaaactactccagttttttattaaaaatccatcaaagcacattagttctaatgaaattgctgaacatgtcaatgtttcaaaccgcacagttcgcaatgatattcatgttatcaatagcaattttatggatgatatcatcgttagtattaaatctaaaggatatcaattaaatacatcgcagtataccttagaaacgataactgaacgttacacgcatattcaatcatataaagaaaaactattattatctatggcgtatcaactgctaatgcacaataaatcgcagacattgcaacaactagagcaagattatctattatctaaaactgtgctcaacgactatttcgttcgaattcaacaatggtgtcaaaaatttaatatcgctttaacaatcaagaaaaaacaaggtattgtggtcgatggaacagataatgatatcactaatgccatcatccatttaaatcaattatcatcagggcatgtacatgttgaagacctaattttaaatgaattacctgattcacaccaaaggatgatttcgcatattatacaagagacacttcaacaacatagtattgaaacaactgatattcaaatacaacagcttttaattcatctcattttaatcattaaacgtaagcaatctttaagtgagctagacacgttaaaccacgattcaaaattgatatctcaatcttgcattaagcaaatcaacgaaagattaggttatgacttgaacgaaaaagtaatcaatatgttttcattctttattgcttatcattttaataaactcgatattggcatagaacgtatatttatacaaagttatattgatcgcttaatcgaattgatgcagcaacgtattcatatacctttcaatgaagattcgattttacaacaaaatttatataatcattttagtaaagcatatttacgtatcactcaaaacatttatttaaacaatcctttagttatagagattaaaaaactctatccctttgtgtttaacacactttttgaagcgattgataaattagcaattgatactgatatagagatgagcgaagatgaaattgcatttttaacaattcattttcaagctgccatcgagcgtcgtaccaaaacacaattaaatgtagtcattgcttgttattatggtctaggtgtgtcgaattttttagaaactaaaataaataacttatccgaagagttgtcagtgataaatacgattaaactagaaaatataacacactatcactttgacaatgtagatttattaataacgacccatgatattccaaaacaaacgctaaacatacttcctaagcacctaacgactatcaaggttgcaccattattttctgaagatgaccgtcacaaaatcagactcgttgtgaagcaaaagcaaaatccagttcaagcacatcatcatatggacactgtcaatttccttgtcgtaaatactgaacaaaaatcacggcatactgtgcaaatttttgaagaagctcaaaaaatattacaagcacatcatgcgattgtagaaggatatatcgaatcagctttagagcgtgagaaatcatcttctacatacataggtaattttatggcgattcctcatggagatcctgaaaaagttttacaatcacatgtgcttatttttcgcacaaaagatgtttttccttggcgacaacacgatgtcaaacttgtctttttcttagcgatttcgcataaagacaaagcttttacaaaacaaatgatgcaattaattgctaacttggatgatgattcagtgaaccatttatgtagtttagatgatcatagtttaaagcaacagttatttgaatacttacaagaataattgccactagtaacggtaattattcttttttttagtatcgagaatacgcttacaatatagaaaaggagatgattttatgaaaattgtagctattacctcatgcccaaatggcattgcacatacatatatggctcaagaaaagcttgagcaggtagcaaaagaaatgggtgtggatattaaagtagagacacagggcggtgttggtgctgaaaatgttttaactacgcaagacatcgaagaagctgacggtgtcataattgcagctgataaacaagttgatctgtcccgatttgttggtaaacggttgattaatgaaaatgttcgcgaagggattcataatccgagaggtctaattcaacgtatcattaatcaagatgcgcctatttatcaatctgaaacaaattatcattcgaaagatcgcggtaagtctaaaagtggtattcaaatggtgtatcaacatttaatgaacggtgtatcgtttatggttccttttatcgtagttggtggactccttatcgccatcgcgctgactctaggcggtgaaacgacatcaaaaggattagtcatcccagatgattcattttggaaatccattgaaaacattggtagtttagcctttaaatttatggttccaatactagctggatatatcgctgttagtatcgctgacaagcccggtcttgttcctggtatgattggcggcgctatcgctgctgacggtagtttttatggcagtgatgcaggcgcaggatttttaggtggtattgttgctggtttcttagcaggttatatcgcaaagtggattaaagatattaaagttccaaaagcaatggcaccaattatgcctatcattattattcccattatttcatcggtcgttgtaggattgatatttatatttttaatcggtgcaccaatttctaatatttttgaggcattaacaacctggttaaaaagtatgcaaggtgctaatattattatacttgcgatgattataggtgcgatgattgccttcgatatgggcggtccagtaaacaaagtagcatttttatttggctcagcacttattgctgaaggtaattacgccgttatgggtatggtcgcagttgctgtatgtacaccaccaatcggtttaggtttagcaacgtttgttcaaaagtataaattcaatcattccgaaagagaaatgggtaaggcttccttcactatgggactgtttggtattactgaaggtgctattcctttcgcagcccaagatccattgcgcattatacctgcaaacatcattggtgcaatgattgcatcagtcattgcagccattggtggtgtcggcgatagagtcgcacatggaggtccaatcgtggctgtattaggtggtattgatcatgtattatggtttatctttgcagtgatagtaggtagtcttgtcacaatgactactgtactattattaaaacgcaatacaccagttatagcagtagatgcaccagcgcaacacacgcaacttcatgatacagatattacacaacatgatacagaggttgacaatgtagataaaaccgcgaaacattcagatctcaataaacattctcatgtttttgatcaacaaactatgataattactgatcacgacatgtctcgaaacgaagcaattgatatgttgattcataaacttaaaatttgccgttatgtagagcacacatcgcatttaaaaaatgcaatcctagaacgtgaaatggagtctacgacagctattggcatgaacgtggccattccacatgcaaagtctgatgttgtaaaacaaccgattgtagctgttatgaaaaataatcatggtgttaaatgggacagtctagatggtagtctacctcaattgatattcttaattgccgtaccaaacaacagtcaggatacacatttaaaaatacttcagcgcttatctaaagcgttaatgaatgatgagacacgccaatcactaattaatgcaaacagtactacagaaatttataacttattaatgaaaatatagaggagttttaactatggcattatttttacaacccgtttttaaagacagaatttggggcggtcatgcattaaaagcatttaactatgatatccctaatgagacaactggtgaatgctgggcaatttctgcacatccaaatggtcctaatacaattatcaatggtccatacaaggatatgaccctagatcaactttggtcacaacatcgtgaattattcgataatgattcacgagatagtttccctctgctaactaaagtattagatgccaatgataaattatctgttcaagttcatccagatgatgactacgctttaaaacacgaaggcgaactaggtaaaacagaatgttggtatattttagatgcagccccaggtgctgaaattatatatggcgtacatgcacataataaacagacgttaatagacatgattgataatcatgaatttgacagtcttttcaaacgtatacctgttaagcccggtgacttttattatgtgcctgctggcactgtccatgccattggttcgggtattttaattttagagacacaacaatcatccgatacgacataccgtatttatgactatgatagacgagatcaaaatggtcaattgcgtgatttgcacttagagcaaagtaaagatgtgattgaattaggcaatcatgaaccaaatactactcctataacaactcacatcgacacacacactgtaactcaatttgtagataatcaatattttgcagtatataaatgggatattcatggagatttaaaattcaataaaccacatgcttattgcttagttactattatcgatggtactggtactttaacagtaaacgataagcactatgacatccaaaaaggttctagctttattttaactacggaagacgaggatattcactttgtcggtaatattagtgctatagtaagtcatcctggataatagcaatgataacacccgtcccataaaagacagaaattactatctcttctgtctaaaaacataaaaatccacacattaaggagctataaccctaatgtgtggatttaatttttattctgtaacgttactttggtcaactttttcagatacgcgcttcatcaatggatctgttacaggttttaaaattaaacctacaacgaagaatcctatgccaaataacgttaatataattaattttgtaattaggatttccggaacaataccgcctactgtttcacgtaatgaatcaattgcatacgtaaatggtaagtatggcgaaatgttttggaaaaattgtggcgtagtttgaattgggaatgttcctccaccacctgcaatttgtaatacaagcaatacgattgcaatggctttacctggattaccaagtaatgatacgcacgtatatacgattgagttgaaaataatcgaacagaaaatcgttataagtacaaataatacaggtgactcaactcctgcttttaggattaacaaatctccaaccgatacaatgagtgcttgcaacataccaagcattataaagaatcctgccttacctaagaacacttgtcttgtcgttaagactgactctagactcttatgtttattatcaaccgttaataaacttaccatcaagagtgcacctacccatactgacagtgcagtatagaatggtgtcatacctgaaccataatccttaactgggaaaacatcaacagtcttcttattaataggatttgcaataatacccgcttgctttttcaaatcattcttaagtgtgtcgattaatttgtcgactgcatcatctttgtctaatttcttgaaaattttattcgcttttttcaaatctttttcaacatcaggcaatttattttgagaaaaatcagctaaatctgataaagcctttttcgcttgtggctgatttttatttagtaatcctaccgcttgatcataaccatttaataacgttggtaaatttttattcacacttgctgtcgcattagttaatcgctgttccaactgtggtaagtcattgcgcacaaagttagcagctttagctacatcacttttcactttcgggaagtttgcttgagcatttttaacagcactaatgtattgttgttcaatacttggtaatactgtttgtaagcgatcaatacgtgttttaccattttttaaaatagcttgtccactgttaatgacttgatcaattgtatttaatttagactgaacattggataatgcagtttgccctttgttcaattcatccataatacgttgtgatattgatactaaagagctgttaagatcttttttaacataatctctaaatgatgataatgatgaatctagttttgaaagttgatctagtaatttagtagcttcagcagttcctgaactaccattctttaatgcattgcttaattgattaactaaccttaatgattcattaattcgattattagctgcttttaccttatcaatttcttttgataaatcaacattttcattcttctcaatctcttttaatgtatcgataaattgttgattatattgcgttgtgtattctaaaccggacttaacattatctaaagactctctaaaatcagaaggcttgtccgatgctaaaatgccatacgaaatattacgtaatgcctgactatctttttgtgcggctttcgcttgggtatctaaattatttgataatgataataaagagcccgttaatgccgcttccattgatttaacatctttatctgtaatgttttgtgtgttctcgttagctgtgctgacttgtgttgttgttatatctgcaaaactttgaccatcttttttcccgcttgtactttgtggtgtagtcgatacaggcgcattattactatttggtgcggtattttgcgtaacattattatttggtgcagtatcgccacttggtgcacttggtggcgttgatgctacaccattaccagctgcaggtgcactatttgatgtttcgttgttcgccgcgctattttgaggaatctgttgctggtttcttcgatttaaatcttgcgcgcgtcgaattgcatcttgataatcaccgactctacttctaacttgtgtgacgaagcctttggcatcatttaactgtccattagcttgatcaatcccttgactcgcaatgttaagtccttgattaattttagggaactgcgctggcacgtcatcagctgcaaaatttaacgctttttcaattttcggcatataattatttaaagctaatatcaacttagccttttcattaagttgcggaatagcaccattgacttcgtttaattttttctgagcatctaaaatatcacctttataatttcctagttttctaaaatcattggcatatttatctaaatccgcttggtggttattcaaatatacaattttattcgcaaagtcattaatcttaggtaaagctttatctgccgaatataccgcattttttatcttattaattgtcggcacattttcttcaatagttaaacctgctttgttagcttcttctaataatgctcgagttactgttttattaaattgttcattcgctttttcaacgacaactgacgaaccagtatctgttagcttagacgcaacagcgttaatcttctgattcaccttaaattctacatctgctttttgaggctgcttacgtagtgtcccggtaatttcatgtgtaaacttagatgggatgtaaatacctgcaaaatatttacccatttttatctcatgatcagctttctctctacttacaaactgccaatcaaaacttttatttttcttgagtgtattaaccatcgtattaccgacattaacttttttccctctgattatgtcgcctttatcttcattaacgactgcgaccttgatgtgtcccgtgttgccatatggatcccacattgcccataagttaaaccaagcgtagaacgatggcaaaatagctaagcctgctaagataatccacacagctggcgtcttagctactttcttcagatccattttaaataatttaaatgcgttcttcattgtcacactcctatgtaggaattattcatattttttatatattttttgtaaattaatttatttttgcgttgtgaattagtataatcaatttactggaagatatttagtcgattgatacctatcaactattttcagcatacgataaattataacaaatcatagtttattatcacacttaattattatatttttcaagggagaatacgaaatatgcctaaaaataaaattttaatttatttgctatcaactacgctcgtattacctactttagtttcacctaccgcttatgctgatacacctcaaaaagatactacagctaagacaacatctcatgattcaaaaaaatctaatgacgatgaaacttctaaggatactacaagtaaagatattgataaagcagacaacaataatacaagtaaccaagacaataacgacaaaaaatttaaaactatagacgacagcacttcagactctaacaatatcattgattttatttataagaatttaccacaaaccaatataaaccaattgctaaccaaaaataaatacgatgataattactcattaacaactttaatccaaaacctattcaatttaaattcggatatttctgattacgaacaacctcgtaatggcgaaaagtcaacaaatgattcgaataaaaacagtgacaatagcatcaaaaatgacactgatacgcaatcatctaaacaagataaagcagacaatcaaaaagcacctaaatcaaacaatacaaaaccaagtacatctaataagcaaccaaattcgccaaagccaacacaacctaatcaatcaaatagtcaaccagcaagtgacgataaagcaaatcaaaaatcttcatcgaaagataatcaatcaatgtcagattcggctttagactctattttggatcaatacagtgaagatgcaaagaaaacacaaaaagattatgcatctcaatctaaaaaagacaaaaatgaaaaatctaatacaaagaatccacagttaccaacacaagatgaattgaaacataaatctaaacctgctcaatcattcaataacgatgttaatcaaaaggatacacgtgcaacatcattattcgaaacagatcctagtatatctaacaatgatgatagcggacaatttaacgttgttgactcaaaagatacacgtcaatttgtcaaatcaattgctaaagatgcacatcgcattggtcaagataacgatatttatgcgtctgtcatgattgcccaagcaatcttagaatctgactcaggtcgtagtgctttagctaagtcaccaaaccataatttattcggtatcaaaggtgcttttgaagggaattctgttccttttaacacattagaagctgatggtaataaattgtatagtattaatgctggattccgaaaatatccaagcacgaaagaatcactaaaagattactctgaccttattaaaaatggtattgatggcaatcgaacaatttataaaccaacatggaaatcggaagccgattcttataaagatgcaacatcacacttatctaaaacatatgctacagatccaaactatgctaagaaattaaacagtattattaaacactatcaattaactcagtttgacgatgaacgcatgccagatttagataaatatgaacgttctatcaaggattatgatgattcatcagatgaattcaaacctttccgtgaggtatctgatagtatgccatatccacatggtcaatgtacttggtacgtatataaccgtatgaaacaatttggtacatctatctcaggtgatttaggtgatgcacataattggaataatcgagctcaataccgtgattatcaagtaagtcatacaccaaaacgtcatgctgctgttgtatttgaggctggacaatttggtgcagatcaacattacggtcatgtagcatttgttgaaaaagttaacagtgatggttctatcgttatttcagaatccaatgttaaaggattaggtatcatttctcatagaactatcaatgcagctgccgctgaagaattatcatatattacaggtaaataagtattattaaacccgtaaaatttataagtataaacaaggagttcggacttaaacatatttctgttcataagtccgatttcttattcaattaaacccgaggcattcagttcgaacgcctcgggtcattttatataaatatattattttatgttcaaatgttcctcatcatatccgtttcaattgccatctcacacattttataaatatgagcaaatgtacttattctcaaacattactgccgagctttaattgacgttatattaactataaactacttttccatgactctacggattcaatgtcacatgagcgtgataaaatttgttcaataataaagtcatgtttatcatctgatctatcaccaacagcatcttctaaaacagtaatataatagtctttatctacactttctaatgccgtgctcaatacagctccacttgtagagacacccgttaatactaaatgattaatatcatttgcacgtaaataaacttccaagtaactacctgtaaatgcgctaaagcgtcgcttagaaataatcggctcatcttctagtggtgctaaatcttcaagtattcgtgtagatgcatctgcttcagtaatcgcatatccttgagctttaattgttgaaaacactttattactcgaggagacatcattaaaatgcttatctaacactaaacgtatgaaaatgactggtattcgatgttgtcttgctgcttcaattgctctctgattcgctttaataatattttttattctaggtacactactcgctataccttcttgcatatccaaaactaatagcgccgtttttcgagacatcttcattctcctttacttgtgtagttctaagtcgttaaattcattataacgttaaaatgatggacaatctattcattgcattttgcatatacttcacaataatttaaggggaaataagacgtcttatatacttaaaaaaaatatatagatgctcttcccccaatataattatgctttatttttcaacttattgcgtcgtgataaccaaatcattagtacacccattgcaccaacaattacagatatcggcaaccaatgttcttttatcgtttcccccgctttaggcaaagatacattaccatcagcatttaataatccacttaacaatccattacctttaccaagtgttaacgtcttttctggctttggtgtgggtatatctggaatactgtctaataaatttgatccttgattcattaaatttgctaacttatttaaatccgtcgttttcccatttttattcaatcgatctagtaaacttggacgatttactattggtgataaaatatagtctatatcttttttcgtttgattgagtctcttttgtaaattcaataaatcatccgctttaccattcaatgccgatttaactaaattaaaaattttattttgatctgtttctattttagtaattaaatctgccagtaattttgccttttgtctttctatacgtgttgctaaaatcgtttcaattgcttgttttttatctttcgcattattcaaaattgcttttaatatatcatctgaagacgtgtcgccagttgatgcaaaatgtttcttcaattggtcaacgatttggcgatttgataatcctttattcgtccaatctttagccaatttatctgcttcagcttttcctaatttcgtttgtaaaatttgagaaatcaatagcgacttatcttgtgattgatcaatcaatgacgttaataaatcatcactcgttgtcagagatagttgatcaatatgacgagtaatttgatctgcaatttgttgatccgttttaccatcaacacgtatatcttttagaattttatctgcctcgtctttattaaatatactttctaaaatgctttgtgtagcatactttttatcatcagtacgtgcaagttcttccaaaataatatttcgttgactttttatacgctctttcgtcttatttacttcgctcattaagtctgatttttgatttttaggaagttgcgtatttgcaatacgttgatctaaagattgtaacgtattcagtttatgatatgtgtaatgttgcgttgaggcattacttttagccaatttttcaatcatagcatgattaattttatcgcttccttgtaatttatcagtgagtcgattactatggctttgattctcttcatttgaaaggaatttatttaacacaacatgtccagaaccatcattatttggcgttttagctacttcatgattactatctgttgtagacactgctggatctttcgatgcatatttcaatgcatctttcgatttgtgtatttgctgattcaaatggtctaggtcttctaacgccttatttaccattgcttcatcatttttatcatctttttctccatgttttgttgtagccgtttgtgacatatcatttttcattgcattaagatcgtcctcgccactttgttgacccctatcaacatttgaagaaacctcatttaaatctttaagcaattgatctaatttactgtctatatcactttgaccgttcatttcagtgtgagaacttttattgtctttgctatccaactcattagctcgttttatgatttcatctatttgcgatgctgttttcgcttcatttagttgtgctttataatgtgctttagatgaagccgataactgttttaattgctcaatttgacgaattgctttgtcaactttgtctaataaatcttgcttagataatatctcttttgaaatttcagtatccttttcagatgcagcttgggcatcgtacggcaagatattcgttaaaatgatacttgtcgccatcattgtcgaacacgataactttacatataattgaaacggttcccctcgatatttagccatcaatatactccttcctcacttacttccttcaaagaattacatactattatatacctgttcacaagaaatttatacttatctatctagttattgttgttagtaattatctacttattacttagcttatatttaagtaaacaaaacaagcatgacgtaatatcatattgtccatgtcgcttacatcatattacgtcaaatcttttatattaaatgatgctttattttagactgctttttctttttagctttcgagcgcctgtttaaaaacttgctcgaattgttcacgcgagatttcgtgtgcatgtgctttttgtgctaataaagcatcttgaaactgttgttgatctttcaaactctctaacatttgtattaattggtctttactttccattgttatctcatcattatgctcaaataagtgctctgataatgttactttagcatggtgtgcggtttgacgataacctaaaatcaacaactcatagtcaaacgcttgttccaccgcatttaaaatttcattaccctcattgatatcaagataaatatcacataactggtatagttcatttaccctatctatattaatagatgggtataaatgcacattagcatattgatcaagttgcattagcttatcagacatctctgtaatagcagcgatgtgaaacttaaaatctggtaaagtttcaaccaataccttgatgttacgaagttgatccgagttagttaatattacaatttctttagtatatctattacgactacgatagttatatagatatccgccttgtaaaatacgagattgaacctttgcgtctgctatattgagcatcgtttcatattcgtttttatctggaataataatattacaatgtcgtttcatatcacctttacacatcaattgcatatttcccgggacattaccattacagtgttcttgccataccaaaacatcactaccttttgatggcaaattatataacactgaaaatggtagggctagtgagttaataacgaaatgatgttccgtaatttcaagttgcttgataaaaaataatacgaatgcgagctttgaagggaaaaagtaagacttcccttgccaatccaatatgacatcagatgttacaaaattttcataaatcacttctttaccttctgctgtcatatatttcttcaagatcgctttacgatttaaatcgtaaacagtttgtgcaaatttaataccattcttagaataataatcgacaaatcggacacgttgttggtcatcaaaccattcgacacgactaacaattctagggcgctctccactttgataaaatattttgcctcgtagacgtcccatatcattaattgtagccgaattgttgttacctttaatttcccaaaaagctggtacagtaacctgattaaaaaatcgtggtttcatattttctgtattatgattatctgcaaaaaattgatacggtgatataacatcgtccggtaaaaagccattgtcattgagtacaattgttaaatcttcttccaacttactggctttaaaagactcatataactttcgtgaatgattgttaaagtaatcaaataatttaatcatgtagcacctcttgaactaatgtttcccattttaaaataatatcttgagtcataaattgctgtgccacttcataagagatgtcatgtggtgtctggggaccattgttaaaatacattacaatggcatgagctagttttgcgataacatcatccacactatcttcatcggtatcaaaaggtaccaagtagccattttccccatctcgaataaaggttgggttaccataattcacatttaatccaatcatacctagtcctgagcctaccgcttccattagtgttaacccaaaaccttcgctagttgatgcagaaagaaataactcataatcattataaatttcatcaagtttaacatgccctagtaaacgaatataatcttgcgcgcggtgtgtatcaataattttacgcagtcgcgtcttctcgctaccttctccataaatatcaaatgttaattctggcacttgtcgtttagccacgataaccgctttgacaagccaatcaatatgtttctcatttgctaaacgagatgcactaatcatcgcatatggctttcttgataatttaggatatgataatgcatcaatgcttcccacaggaatagtataaacacgtgggcgataaccttgatattgctcaaattgtcgacaaaccatatgattttgaatatctgttgctgtaataaagaaatcaatgtatttagcttttgaaaattgatattcataataattgttccatagtatatgctgctcactcatcatattattactataatgatcagcatgaatcacaacaccaactttactatcacctttatgctgcaaaacagcctgaccaatatcagaagcgcggtctaatatgacaatatcgtctcgggttaaattcaatcgttgtaaaaagtatgcaataaattcggttttgttatacaacaccgcatcttcaaacacatatatagagctgtctccatcaatatattcgttataagcgatggaaccatcttcattatagaattgtcgcatatataatttcgctttattatcagctggtgcataatactcagaaaatatacgcgtataactataaaaatctttacgtactaacatactattaattacaaattctgcacgatccacaacatctttttgttcattttgtagataacatgttacaaatgatgatttcccattaaaatatagacggactatcttaccatttctttctctaaaactaatttcatgaccaagctcacgttcaatgtcatctaacgtgtacgttgttggtgctatagaaatatcactaaaatactgatacaaccaaataacttcttgatctttaaacccaatgttttgcgttaatgtctgtatgttctctgactgtataaaatctaaaaacacaaatttagtgtcttgatttgtacgtctcaataatttagcacggtaagcttgtgcatattcaacaccgctactcgcccagcctataccaaagtttatattatatattgtcatgcgctaccccttttcatttatggaaaatgtataactggcataccctctttatcaaatgtaatcatgctttgacaaatatttttcaccattctttttttgatatttcgtgtcataacttcaaatgaatctaatgcaactctatggtattcaaaaatagcgttacgttgcccattttgtcgttgattaacgcttgcttttaattgttgtaaatagtcgacttgttctaaccaacatgaatcaattgctttcaaaaagactttttgaacgaaaatattataataatatgcactttgcatgtttttacgattcaaagctaattgcttttcaaattgctctaataaaaatgtcactactgcttgcttatctttaaaattaacacaagccacatctttattaaattggaaacttaaattttgataaatatactcgacaacacgcgattttgttagcaccttttcctcatttacaaacatttcaaatacatctttagctaacgctttaaaatcttgattctcagcatcatctatttctaaaactcgattgcgttcctcgtatacaagatctcgctgtatactaatgcttttttcaaattcattagccatttcacgagctttaaccccttgttcttccgagatacgctgcgctttaactacaatttgcttaactttgcgattaaacaaattactttgcgataatcgttgtgcatctaatgaatataattgattattttccgctaaattactatcgctccatcgcttaactaaataatcatctagtgaaatatatatacaagatgatcccggatccccttgtctaccagaacgaccacgtaattgcctgtctacacggctattttccatatgttcatgaataataacagctaatccacctaatgcttcgacaccttcaccaagtttaatatctgtgcctcgacctgccatactagtcgcaacagtcatggaaccaatttgccctgcttcagctatcatctgcgcttcttttgcaacattttgcgcaatgagtaaattattaggaatatccatttggaataatactttcgaaaagtattcagccgcttcagcagttctcgttatgagtaaaaccggtcgccccgtttcatgaagttcaactatatcatgaatcatcgcgatgtttttctcatcaactgaacgaaacactttatctggttcatcgatacgttgaatcgctttatcagttggtacttgtacgactatttttgaatacaaatcaaagaactctgattcgcctaattttcctgtagctgtcatacctgaaaatgattcaaaaagtttaaataaattctggaaggtaattgttgccataacacttttatctgttgaaacctccataccttctttcgcttcaatagcttggtgaagtccagcttgcaacttagttcccggtaacatacgacctgtaatacggtcaattaaaacaatatcaccattatatacaaagtaatcgacattagattcaaacaaatattgcgcgcgcagtgctagattaatattacgcactaggaccatcgcttgttcgctatataaatcttcaacattaaagtatgattgtgccgcttcaataccttgatttaacagccatatttcttttttggtcttcttcattttaaaatgcacgtcttcaatcaatgtatctacaaactctttcacaatatgaaatagatttgattgtaatcttggtgcgcccgaaataactaatggtgtttgcgcagcatctaaaatgattgagtccacttcatcaataataccgtaatttaattgtggtaaaaatttcccttccgcactatcagccaaattatcaattaaataatcaaaaccgagacgtccattagttgtatatataatatcatgttcatataaattacgtttttcccctttttgatactcataatccacaatatcaacaaaacctaatgaagcagttaaacctaaccattcatataatggttgcatctcttcaaaatcacgcttcgctaaataatcattcgttgtaattaaatatgttccttttcccgaaagtgcatttaaatataaaggcatcgttgctgttaatgttttaccttcgcctgtttgcatctccgcaatgttaccttcatgcaatacaatcgctccgattaactgaacttctttaggatacatacctaatactctccagctcgcttcacgtgccactgcataagcttcaggtaacaatgtatctagtgtatcaactcctgatgctaaacgttctttaaattctattgtcttttgttttaacgcatcatcagaatatgatttaacttcatcgccccatgtattgatgcgtttcactatttttctaatcgactttagtcttaattcgtttatcgtaacatctagtttatgtttcatttacttccccaccattcagtttcgatacatctaagtaatctaaaaatcgtactggattcattaaacgtgacatataatttagatggttgtcttgctcttctttaaaataaacctcgacatttgtatcttttagttcatgatttcctgggacatgttctttaagccattcttttaaatcatcatcttcatggcttgtacgatatactttgcaatctaaatgctgagcgacataagttgcaaaaacatttgactttgacccataactaatcaaattaatagccgttagggtatcttgactttgcaaatcatcctttagttgcttaatattttccttgatatcgtcttccatccaacgttcgacgagccaaacatgaccaaacagtttcaaaaaatcattcgaaatagttggatagacgtcagatggttctgcaataatgacatttattttatcatttccatattggttatcgtctatcttcgttacccgcatgcttttatattctaaatcatcttgatgcgtcatctctgtgattgttaaacatctaaatacaagactcgtcgatgctgcattcatcatttttattttataagcataggcttcatcaggatattgaatcgtaatactatttgactttacaatctcagtacttagttttgtgccatttttattataaaaaatgatgataaaatacactgaaccagcaggcgttgcatcaaaatcaaaatgcaatttataatgctgtcctctacgcaaaattggtaaacttggcgcacttttatattttgaaaattgctttaacatcaaccactcatgaatcggtaatccagagggcatcaaagggtttataaaagtcacttcaccatttgaaaatgatactttagagccatacataaatgtagtttgtgaaatataattccaagtaactttaaatgttttgtttttcagcatgttgaactctcccaaacttgtcttccaaaataatgttgtaaaaattaacaaaccaacttgcaatggtaggtgaatcatcattatgtcgcccaggaatactgcgattcatcactcttgcttggtgtgctgtcaatacaggtaatagctcttgaaatgcatttggatcataatcatcatgttgcatatatgctatggcaaaaacagtttgtgacaatgatttcttttgaaatgtttgccaaaatttttgatttaatgcctgtatcgacgcttgagatgtatcaccttcattagacaccaggacgtctaatgctgtaccgaactcttctggtctaagtaatcgcatatgttcagcaatcgttccaatattaacaagtggtttaccaacaataattgcctgaggatttaactgagcaccataatacaaggcaccaaatgaacccatagataaaccagataatattaattcatgtgatttaaaattcagcttttctaatgtctcgtcaataacattgataataccttgttcatattcagatgaaccgatataaaaactaccaccttcaacacgaggatcgccgataagtaaaaacggtgcattcatacgtttcatcatataatatccttcgaaaccttccgctgttcgataaccactaaaatatacgtttagtggtggtttcatatcaccagggtggaaataataaataaattcctgtcgttgactatctacgaaacgactaccaccgagtaaaaattgacccatatctaatctagaccatcgtttgtgtataggtcctaaatgtaccgttccgttgccacgcgccttaacagttacacttatataagcatcaaatggtttcgtaggtatctctaaaggactgtctaacatatcatcagtcaatacgatttgttcaattaatgcaccatcagcgccagtctgaatcaatctaaatgtatattgcaactcgaccgcaccatcaatatcaaattctggccatatttgaatgactttatctttatcgtaaacgagattattttgccaagatgcgataggtttaaattcttttccaaattctccactcaatgtgagctctgaattaccttggtaaacgacatctcctttaaaattcggatgcacaagtgctaacttaggagaaaccttatctccatactgtcctgagaagctaactgcctctaatttattattacgttcttcaatattccggtaatgtaatggttgaacaacgtatttttggacattttcgtcttgttcatattcaactgaccaaaatgattcatcaacatacgtattgtatggttcacttatcatttgtaataaattcgttaatgtctccgagtatggtgcttgaatatagataaaatcaaagcgcccttctgcttcaacaatcgcttcaatagcctctacataaccactatcaaattcaaacaatccaatatcgaagtaatcccaactcacaccttttttgtgttgaaaaataggttctaaatcgtctcctccaatttgcaaaactctaaatttacgtggcatcattttcaccttctattaactcatcgagctgattaataatattcttagaagcatatgcatctattaattttaaagaataggcgtacgcataattccaatttttcaaataaaataaataataatttaacgcatcatctaattcatcaactgtatttataatacggccattgtcataatcagagacgtaatctgtttgttgaccattaatttgtggaatcccagcgctaattgcactaatttgtaaatacaagtcaggttcttttgacatatctatcacaagtcgcaacgtccgcaatgcttctacaacatcatgttcagcatgtatcgtcttaacagcaatgatgtcatcttgatcttcaggtgtcattaatgctgaaacattaacatccgcattctgtttagcttggtattcctcatttaccgacgtaatacattcacgaagccacatcggtatgtcattttgatggcgcgataataaaattaaacggtaataatcttcctgtgcgatataatccacaagtcgttgcatcatttgttgcaaatcagcgtcactcataccatctatccatacacctataaatgtttccatcaattgactacttatattaggtgattgtctcgtttcaaatggtgtgattcgaatcattgtattctcccgctgatacttctcttgatgactaattaaatcacgttctagttgcacactatcaacaattaaatgggcattctttacgatagattgatattcctcatctgacacagtttcatttctatttttaaaaaatgaataacttaatgatttcgctggaatatgattggctatttgtcgattgtgcctagcatctgaagccacaatcacatgatcatcttcatgtatttgttgtgcaatcattgcttgaaatttttcttcaattagttgagccatattgttatattctgtttgttgatagtgatgttgatatctttttgaaacagtgactctgccatttttcaaatcttcatgaagtacacaatctccattaatcgttaaatattcttggtaagaagcctctccctgatcatcaaaataacgtatcgctgataaataacctctgtcatcaaaaatataacgccgttgtaactgatctctttcaaattcttcaaaccaaattgaatacccttcttgactaaaataaatatttgtataggtctgttcactcgtcacacattttaataaatacggtgtgtacacaaactcaacatcatccggccattttaagtgatgataattaatcgcttgtggcgcatggtggctgaatccttgaatttcatcaaacacagacgaatactttgtctcatataagtcatatcgatgtaaaaatgttcttaaatttggtgcatgattgagaacaatcagttgataatctaagtcattttcaaggtgcattcccattaaactaatcatatcgtcaaattccgtcttattttgtagttgataatacggcacagtcgtgtcttgccaccatcgttggtcatcgtaccaagctggaataaagtatttcataattacctccttaccaatactggcttaaaaatggcttatatttatcaaaatataaatatgtacgaattgtttctgcaatattaatactgatgtaaactaatacaattagttgtactgagaaataaatttcagtagataaatgcggtacaaacaatgtgaaataaagcggtataccaataatgattgtaactaatgccgatccaaaccaacatacgcgtcgtgcttgataatttaaataacgttctgtatccttaccaggtttaactcctgaaaaataattgccactctttaagaaatctttggatttttgtttagtattgattaaaaatctcgataaaaaataacccaataacatttgaatcactaaatacaccgaaataccaattggactatcaaatgtcagcattggcatgtcatctgatatgcttttattaaacatagataaaataaaatgaatgccactttttaagaaaacaaaagctgaaatgctcatcattaaagtaatactgcctgcagggttaactttccaagataaataagatttcatatttgttgcggaaacgttcattaaatcgatatatggtattctcacttctactaattcaataaataataagataaacaatgtgattatcacaaggatgattaacaacgcaatcacaatatgacttgcatctatatattccattttttgatgcatcattgatttaataatgctaaccattacaatcggcattggtcctgcaatgccgtaacgactatttttgtcagctaaccaaactaataacatcgttccagtaaccaaaatcaatattgttaagtaaatattgtcttgatgaacacgttctttcgaaacatattcatgaatcacaaaataactttgaataacacttaaaattaatgttaagatgcgctctttataatgcttctcaagacttgtttgtttcatgtatttatccatattccgataagaaatcagcatcaagataatcattgatgttaaccacggacctaatcctaaagtgaaaatgtttaaagtattaacgtctccacccatattagaaatagctattttaaaaaatgactcatgttttacttgcatatcgttataggaaacgatggaaatgtttgtgcctaatatataaataaacaagataaaacatgtgtatagcatacgtttatatataattttatattcgtattgttgtaaaagttttaacatgttgcacctcttttatatcaaaaacattaaaaagactaagggttcatcactaattattaaaatcctatatcgatttttctagtgattggtgcctcagtctttttaattttagccagctataaattcaatttatgcttgagaatcatcttgatcattttcatctttctttttctttctcttcattaaacctaaaccaactaataatgtcataacgccacctagtaatccattttgttttattgagtcacctgtatctggcaatcttttttcactttgtgctggcgtgccattatgtttagtcacttcagatgttgcacttaatgtagactgagattcactcgtgctcgttgttgcttcacttgataagcgagatgtgctcgtgctgtgagtatgatgcatactcattgagtctgacggatgcattgagttagattcagatgtacttgttgagccggacatacttgttgatgtcgagtcagaaatgctttgtgaaccagacatagatgtactcagtgattcggatgtgcttgtcgaatcggatgtgctcaatgacgttgatgtgcttgttgacactgattctgagtcgctcactgaagtcgagttgtacgttgaaccggacatactttgtgacattgaaacacttgttgaatcggattcactcattgatgttgagtcagatacgctcgttgaacctgaaccagacgtacttaatgattcagatatgcttgttgaagttgaaccacttgttgagtccgatgtacttgtcgatgtcgagtctgaatctgatgtactcaatgattctgagtcactgatagaagttgaatcacttgtagattctgattctactgtactttgtgaaccactgatacttattgaagtagaatcactgatactgtctgatgttgataatgatgtcgacaccgatgtgctttgtgatgacgatgtactagcactcattgacattgatgttgatatcgatgtacttaaggaaccagatgcacttgtacttgttgactggctttgtgacattgaatcacttaatgatgtagatgtgcttgttgagctcgagtcacttaaacttgttgaacctgatattgagtcacttaaacttgtcgatgttgaaactgatacgcttccgctcattgagtcagatgttgaaagtgatgtactcgttgaatttgatccactgatgctagacgaatcacttgtagacattgagtcgctttctgatgcactgatgctcatagagtcaaattgactattacttgttgagcttgactgcgaatcgctcacacttgttgacgttgattctgatccactcatactttgcgagctactcaatgattttgaatcacttaatgaatccgaagtgctaagacttgtggaaccacttaaagatattgatccacttaatgagtcggagtcacttgtactagtagaatcactcattgatattgaatcacttagcgaggtagactcgcttacgctttctgaaccacttaatgatgttgaggtactcaatgaaccagatgtacttgttgaagtcgaaccacttgtcgattttgaatcacttaatgaatcagattcactcacgctttccgaacttcttagtgacgtcgatacacttaatgatgacgaatcgcttgtgcttactgaatcgctcatcgattgtgagccactcaatgaactagactcacttacactttctgattttcttaatgacgttgagacgctcaatgagccagaatcacttacgcttgttgaaccactcatcgattttgagtcactttcagaattagattcgcttacactttctgaatcatttacagattctgacatactttgtgaatcagatatgcttgcgctcattacttcactagccgatgttgatgtgcttgtcgaatcacttaacgatatagacacactcatcgaaccagatgtactcgcacttgttgagtctgatgttgaatcactaacactatcagataatgacgttgaatcactcatacttgttgatgtacttgttgaaagcgacatactttgtgaatcacttgtacttgtacgcatcgaagtactagttgaagctgatgtactacgagagtcacttgttgatgttgatgtacttgctgatccagatgcacttgtacttcttgatgtgctttgtgaatcgcttaatgatgttgatgttgaatcggattcacttgtactttctgatgttgagccagattctgatgtacttaccgatgttgataaacttgcaatggtcgacatgcggtttgaagttgatgtacttagcgaatcacttaatgatgctgatgtgctttgtgaatcggattcactgctttgcattgacgcagatgttgaatcacttaaagatgttgacgacgaatcggattcacttgcgcttgctgagttactgagcgatgttgacgtacttgctgatcctgagttacttgtacttgttgagtcactgagtgatgttgacgcactttctgatgttgattcacttgcacttgttgagatactttgtgaatcagattcactctctgaaccacttaatgacgctgatgtgcttaccgaacctgattgactcgtacttttagatatacttgttgaatcgcttagtgacgttgatgtcgatgtggattcactttggcttgttgactgacttgtatatgatgatgtgctttgtgaatcggattcgctcgtgcttgtacttgttgagtttgaggcactttggcttgctgagtttgagtctactccgctttgattcattgatgcacttagtgacaatgacgtactcgttgagtcagacaaacttgtactcgttgacgtacttgtacttcctgatgttgattgagacatacttatgctcattgatgttgaatcggatttactttcacttgatgatgttgagtcggattcactttcacttgtagaaccacttaatgatgtggatgtactaatggaatcagatttacttgtactgattgaatcacttgtcgacattgatgtacttaatgaatcagacttactatcacttgtggaatcacttaatgatgttgacaaacttgtagagtcagacaaacttgtactcgttgacatacttagtgatgttgaaacactctcgctcttaaacgttgacgttgattcactgatacttgtcgatgttgaaatggacgcactaccacttgttgaattacttaatgatgttgatgtgctaccagattctgatgtactgtctgataatgacgtactctcacttgtcgaactactcactgactctgatgttgattcagacgtactttcacttaatgattcacttaaaaaggcagatgcactttgtgattctgaatcgctagtactatttgattcacttaatgatataaacgtgctctctgaagcagatattgcttcacttatagagtcgctcgttgacgttgattcacttattgaatcagactctgatgtacttaagcttgtggaatcactcatagatgttgatgtacgttctgaattacttgtacttaacgatgtcgaagtacttaccgaaccagatgtgctcgtagaagcactttgtgatattgattcacttgatgcagttgatgctgatttgctatcactcgttgaatcactaaacgacgttgatatgctcattgaatcggattgacttgcactcattgaaccagacgtactttgtgattccgaagtacgtactgaagcacttgtcgacgttgatgtacttgttgaacctgattgactagtacttagtgataatgacttactatcagaatcagatgtactttgtgaatcacttaatgattctgatgtactacctgactgagacgtgctcattgaactacttacagacattgatttactgtctgatgcagataatgacccacttgtactgatagagtcacttactatctctgaagtactcatcgagtctgatgtacttgttgagacactttgtgatgctgctatgcttagtgatccagaaacagaaccacttgtgctcgtcgaatcgctcaatgattctgatgtactcatcgattttgaatcacttgtacttaatgatattgatgtactttgtgaatctgatttgcttgttgacgcactttgagagttggctatgctatttgaaatactgatagagtccgaggtgctagctgactcgctcaatgattctgatgtgctgattgcattcgatgtgctgtcacttaatgatgctgatgtactagacgattctgatgtacttgttgatagactttttgacttagacaagctccccgatgtactcatacttaatgagtcactgagtgacgttgatgtacgcaatgaatcagatgtacttgttgatagactttcggatttttcagtactgctagagtttgaaatagaatcgcttaatgatgttgatttactagctgaatccgacatgcttgatgatacactttgtgaattcactaaacttgtgcttgttgagcttgatacactattactttcagatgtgcttaatgacttagatgcactcacagaatcagataggcttacacttgtcgatttcgaggtactagctgatgtagataccacaatcgatcctgatgtactcgttgatgcactttgtgagtcagctttacttgttgagacactttgggattgttgtgtacttcctgatgttgatacggaatcactcatgctatttcttgttacttcatatttaaaagttgttgtcgttttgttaccactcgcatctgtagaaacgattgtaatagtacttgtaccaatgtttgttggtgtaccactaatggtattatttgtactatcgaatgttagtccagatggcaatccagtcactgtattcgtcaccgcatttccactgttgtcctgcgtagcaattttaatcggtgatattggcgaatacacttctgatgattgatctcctattggtgtcactgttggtgctgtcgtatccacaacatttattgtaaaagttgtcgtcgatttattgtttgcttggtcagtagacacaactgtcactgttgattgaccaattttcgttggcgtcccaatgattgaattcgttgcactatcataacttaatccgcttggtaatcctgtaactgtatttgtcacagtcccagtaccattatccgttgtagtcaacacaacaggattcattgttttacccacttcaatggtttgattgcctacagttacagttggtgcttttacatcagtaaaataatatgtcactgattgtccagcattcgtcatttttacagttttatttgtatcattataagttgacgcatatgaactatcgacggacgtgtagttatatcctttagcagtcaatgcagattgctgattatcgattgtcacgacttgatcaacatttcctgaatatgtttttggtggaataatatctttacctgttgttacatcaacgtatctcacttgtgtaacagcagactctgtatattcgaatgttccaaattgtacttgttgtaaatttgtcgcgccacctgttgaggctgtcattgataatgaaaagttggtcgtaccactttttgcaatccaatctgaaatattacgtgtccatgtttgacctgcatacgttacagtcataacttttgtatcaccattataattaatatcaaaatcttggaacgtgttgttcgtaggttgcacttttaacttcgcagcattatcagctgttgaacttgatgtatacgttgtcgcaacaccataactatctgttgttacaaaggcaccaaacgcacctccaccagctacattagatgggtcagcattcgcctttgcagctgaatttggtttagatgtattgtgatacgtatccaatttgaagccaaatgcgttacttaagccaccaatacctactgcggcaccgtttaaccctgtttcacctaatacacctggcgaaaaggcaaagccgataccatctccaccatttccattaccttcgtatttattacctaaatttacttttccagaaaaatgaaaactcttattagagtcaatacgtgttcctaatgtaatggcacctttttggctgtatgcatcctgtgttaacgtcacaataccggtactttgatcataggtagcattacctgacgttgtcatatattgttttaagttatctttattaactgtaattgtattagcagttactgcggttgtcgtcgctgctgacgcaaatgttgacatagctaagcgactgaaagttcgaagttttactggtgcggtgctagttgacgttgtgctagttttgtttaagttgaccgaagatggcgttgtgctttgtgaagtgttatttgatgcagtactttgatttgttgatgtattaattggttgttctgtacttgaagttgaagctacagatttagtatcagaacttgatgtagtattctttgaggatgttgattctgatgtagatgtcaatttttcttgttgattgcttgtactattagttgtcgaagtgaccttttcagacttttcacttgagactgtgtcactatttgatgtttgtaccgaactactatttttcgttacacttgtggaatcggctgttgatgttgatgcttcgattgtcgttgagttttgattacctactgtttcactttgtgtgtttaattcagaagttaatggtgcatcagaagccgcaaaagcttgctggtcatgcaacatatttaccgtgaatgcaccaccaataaccgccgtagttttcagtccgtatcccgtcatttttttactaatgctttgattatcttgactcactaaactatgactaataaatggtagccccataattttgaacatttctatttctttaattccggattttacccaattttttccagatttataaagtcttactcttgttttttcgtttgctaagctgtcatgaaattctttctgtcttttactcatgtaataactccttgtattatctttacattcattagattataatatatgccactattcaatttaatacaactcttttttgatacaaaaatactcattttgttaaaatttgtaaaaattcatttttattcgtctaaatgtaatcgttttcatatttttaaaattactttttctcgtttatgcgtataatctttttttatataaatttggctaattggctttatgtttaatcattataattgtttcgtttttaaaataattattgtattaatatatctataccatccaccttttatttataaatagttaatttacaactaaacgataaatattatatgcaaaatacatctttaatattaaagtaataccaatattttttcaataaacctagtgtaatatatgtgtaattctaaaagattcttctttaaaaatataaataccacgacatattgctttaacattttcatttataaagcgaaaaaatgcatcgctactaagttgaatgtttagtaaggatgcattgaattcactaaaatgattaaattacttatatcttttcatctgattgattatcgaaatttcttccttctaaacctgctaactcttctttagaagctgcaggtgctttcatttcaaatatctcattcactactgtgtaatcgtaatatcctaatctggcaataggtttaatcgacttaatgtccaatttaccattatcaagaataaccttatcgtcaatatgaacttgagcaactcttcctataacaatatctacggtagatactggatctccagttggaatacgaatcgtttgaacgtactcacattcaaaatgaactggcgattcttttacacgatatcctggagcttctatacatttttcctttgttacacctgcaaaattaaattcatcctcttctggtggcaatgctttcgatgataaattaactgcttctcttaaatcatacgttgccatattccacacaaaccaacctgtctcttcagcatttttcactgtatctttacgttcgtgatcaccaagaacggattgatttgctgcgaacataaccataggcggatcccaagttaagttttgatactgactataaggcgctaaattatctttcccatctttcgatacagtagagatccaccctattggacgtggtactgtactacttttaaatgggtcgtgcggtaaaccatgacttcttacaccttgttttggcgaataattcatactatcttcaccccttataagtaattacatttaaggttacgccctctttacataagcgtctaatataaataaacaatttatttataagtagaaactatatatgacgtggttgcttataatttgcgttcttgatccgaaaatttcagataaggatttatgcaattaatatttatgatatcttttgtaaatttaattaattatagttacttcaatcatgattagtttataataatattgaataacaattttttgatttttgtgtaatttatctatcaactgaaaaacagctaatacaaaggagctaatgaagatatgagaaaaattatgcgaatcttattgtgcgcatcaatcatagtaagcggttgctctttcataccaaagaatcaaacaaaatctattccaaaaacggttagcgtcaaagattatgatggtaaatatattggtgagcataaaaaaagaaacgaagtatttctgaaaaaacataaagatgaagcaatcaaaaaatacaaagactacgtgaaagacacctttggttatgattgtaaaattaatttagttgatgcctacactaataaatctggatttagcgagaaaagtaaggtagatggtatctcagtggttggtactgtcaattatgacgttccttttcaactccaattgctttttgttgaatctggaaatggtataactatttcaacatttacacctggtcatataaatgaaacatcagcagccgtttcagccatgatgtacaaacgttatgaacatgaaattgaacaagctcgattaaagcttaaaagtgaaattgaaaaagacagctattatgcgatgagcgaaaaacttcaagtaaaacaagaatttaacggcgttacaaggcaatacttgaatttcagaacagatagtatcgatgatctggataagttcaaaaaagaattcaaacctgttatgcacttaaaaggtgatgcattcaatcaacagttacaatctttgattaacaaatatccacaaatacaaaaaaatatgaaatcagagttcattgcttattatgataaagaaaaaaatagagaaacagtaaaaaactatgcttggaaccttcaaaaatctataaatgacattatgcaatcatatcctagcacaaaatttgtacagttttataaagatgatgtttccccgtcaatggtagatggaaatggccgtttaaaatcggatactaatgtaatttccatcgagggaggaaagtatgatgagaacaaataatcatataaccgatttagatgctattgagttaagtagcggttggaattacaattcgaaattggagactggcaaaaatgcactactatcagatagccttttaagagatattaaagtattaagttctaatgctaaaggcgacgctgacatactagaaacagaacttcgtgctgtaataaacgcaatgtctcaaaacgaaggtaaatctgttgatgcacttaaaaatagtaccgctcctctaaaaaacaatctaaccaaattaaaagagcaactcgacaaaactacacattaatttcatacattttgagtgaacagaattatatttccatagcaaacattcctaaactacacatacgttacataattgattcatttttatagaaacgggtaaaaatgataaagtaatcatctttcacaaaaaatcaaatattgggaggaattaaatatgattttgcgttacgcaacgaatttaaaacttgcgaaagagctataccaagccagtaaacctaaattgcaagaagataagggtatgattgaactgtttgaacatacttttggcttgcaaaaagaacttgtaaaatacgtcggcattgcagaagcaactactgctgctttatactcagctagctttatcaataaaaacatttctcgccttgcatcactatcaacgataggcattttaagtgtagctgcttacaaacatttcgaagctggccaaggtaaaaaaggtgcacaacatgcattagatttattaggtcttgctactttaagtttactagatacattttcttgtaataaaaaatagtcttcattttagaagcacatactttagcacctgtgtacttttgattcaatccataaacggtacaccgctatagcatgtgttttattatttttctggtctctttatcgtaaatattccccctaatttagcataatcatttccggctaaacgagaaacagcctgtaatgcgtgtggattgattttaaaatcaccctcataaatactgtcatcaatatgataagttacaatttcacctattattaaatcagccccatctaatacatctccaagcaatatcatttgcgatagtttacattcgaatctcattttcgcatctttaattcctggcgtcttaatcgttgtagatgttaaaagtgataattctgtacgactcaactcactgtcaccatatgctaacggcgctgcagtctcattaatatcttgaacattatcttcgtctgtaatatgcacaacaaagtctccagtccgttctatatttaatgcagtatcttttctcttacctcctgcacgttgaactgcaatagcaatcattggcggatgattattaacaatattaaaaaagctaaatggtgctgcatttactgatgcatcttgatttaatgttgtaacaaaagctataggtcgtggaataattgaaccaattaataatttatagttttctctagcagttaatgattgtgcatcaaacgtatacataatacctacctcttttctaagtatatctaggtatttctccgattttggttaatttaaacatctattctcctctgaaaatcacttgtatttatttagcaaatcttttgaaatatgacacatatgcatatcttctggatatttttctaaatgttgctgatgttcttcagcacttttaatgtagttagacagcggtaagacttccactgcaatttgatctctgtctttacgtcgttcaatgaactgacgcgcttcaattaagtggtcatctacacaactatataaacccgttcgatacttttgtccaatatcatttccttgttgattcacactgtaaggatcaatgatttcaaataaataattcataatgtctgtaattgttaacatacgatcatcgaaatgaagtttgacacattcagcataaccatcatacggaccgtctaatttagaacttcttccatttgctcttcctgcttctgtatgtataattccaggtattgttgcaaaaaatgcttcaacaccccataaacatcctcctgctacataaacaactgccatatttacacctcatcatccttttttatatttttaacaaggttataccatttaataccgccatgacatgattctgatacaccttcattacgatacccatatttttcataaaatgaaattaatgattctcgacatgttaacgttacaccatgtcgatgatgattcttagcaagagtttcaaaatagtttagtaagcgacctgcaataccctgaccttgataatttggtgctacaacaagacctaacacactaatatagccaccttcactattatttgtggagacatttttaaataaatcatcgctaatgtaacgctcttttatgactggaccgttgatgtatccaattacttcatcattcttttcagctacaataaaagtttcttgaatttgttcaattctcaatttcaatgcctctcgtgttgcagcttcttccggtgaaaaaccaatattttcaagtgcaataatttgatctaagtcctgcatgattacttttcttaataccataaaaacacttccttagccctatatatcaaaagtaataccttcatctttatattcattattttcaaactaccttcactataaaaaacgagtctttttattgaaagccattcgccttaatcaattagacaagttgtattatacgaattagtaaataatcatgattataattcattttaagcatactcaaaaagactggtacatgtataccagtctaattcgaaaaaatatatttagttaaaaccatttcaaaaacgacttcacttttcctggcttagtcggtctgtctaaataaacaaaattatcattgattactgaactggcatttcgaagtaatgcttcaatatcattcgaatatttcttcaatttatgattgtgaaataattcttgcatcaaaaatggtctttggtcacatgaatgtgcatctgaagctacaaaatgagccaaattacattctataaattgtaatgataacttttgaatgtttttaccaaatccaccaactaaagaactcgatgttaattgactcaatgccccatttgcaaccaattcatataatatttccggatttttggcgatacttctatttctttcaggatgtgcaatgattggtatgtaacctctcgattgtatttcaaaaaacaattgttttgtataatgtggtacttcgcccgttggaaattcaattaataaatatttcgaacgattaataccttgaatactaccattatctaagcctttcagaatcgaatctgtaattctaatttcttgcccgggaaataatttaatatccaatgcttgaacttctggatgcgttcttaactccgccaatttcacaagcacttgttgaaatgtattatcatatctcggatgcaaatgatgaggtgtcgctacaatacttgttacaccttcatccttagcttgctttaatagtgcaatactcttttcaattgttttaggaccatcatctatatcaactaatatatggttatgaatatcaatcatgattcatcagtcccataatatgcatagtaactagcacttttatctttaggcattctatttaagactacacctaataatttagcacctgttgcttcaataagttcttttccttttttaacttcatctttattattattttccgaattaactacgtagacaacattgccggtaaactttgaaaataattgcgcatctgtaactgtgttcactggtggcgtatcgataattacaaagttataattcatcaataatgtgtcatacaaatttgcaaatgcccttgatgtaattaactctgacggattcggtgggattggcccagacgtcaagacgtctaaatcttgaatttcagttgagataatactgtcttgataagttgaccaatttagcaataaacttgataggccttcattgtttggcaaattaaaaatataatgctgcgtaggtttacgcatatccccgtctacgattagtgttttataacctgcttgcgcatatgcaactgctaaatttgctgcaattgtagacttacctgcgcctggtgcctctgaagtgattacaatgctttgaactgcactgtcaggatttgcaaacataatatttgatcttatgcctcgaaatttctcgctaataggtgactttggttgttcatggacaattaaacttgatgtacttcttcgtgtattcgtcatggtaattcctcgtaaattaaaatttttgtattgaacctaaaataggtaatcctagttgcgattcaacatcttcttctgtcttaatacgcttatctaataattcttttaagaaaataatcaatattgctaaaacaataccaacaataatgctgataactaagttgacagatactattggagatacttttacagcattatcatgtgctgaggaaagtatcgtaacattatcaacactcataattttaggcatgtcatgagcaaaaactttagatattttattaacaattttgtcagattcagatttattcccagtggtaactgatacagtaataatttgagagtttgtttgattggttacttttaaaaatgaattcaactcagctgttgaatactgaccatcaaattctctagatactttatctagaattctaggacttttgataatttccgtatatgtattaacagactgcaaactactttgaacattttggaaagctaaatcacttgaggactttttcatgttcactaatatttgagtagaagcagtatatttgtcaggcataacaaaaaaggttaatgccgcacttactacaagacatattgccggtaaaataagcaataatttaatattcttctttagaatatttaatagttttactaaatcaaacttttctttcatggtttcctccacataatcaatcattgtattcattatgtatgttttataaatcggacaattatatctagtttaacgaccacaaaacatacacaactacattttctctaattatttatataaatattttatcgtttaaaattatatcatgattctctaccattatgtataacttatttatatttttgcacaagatataatattgtccaactttaaatatccaaacctattaataataaaactagataccatcgtactctatcatggctttcttataatcgagtagaagcatcatcattacttgattatttgctctttacaacaccgagcgtgcccgtactcggtaattcaataccttgcgtaacccgtcactgtgagttgggttaatgataataaagcccacaccttttaaaaagatgtgggtaatttatataatttttatttacatttttaacttataaaaaaaagcgcctatgtcatgatttaccatcacataggcgcttatcaataaattattacttattactttccatttcatctaatttatgcggatttcctgtaattagatgacaacttattcttttcaggggaacattacacttttataatatgttcaaagacaaacttaaccattcacaaatataaagaataatattatcaaatcattgaacaaatcgtattttgcatcaattgatatttatattaatgtattgcatttaatttataaaattcatatacatcttaatattctcaatatcgatttgtattgtcaactttatatagatttaaaaaaataatctcatgtctttttttacaaaagtaagttaattattacaaactagtaacaaaaattatttcttcaaaaatatatttagtagcgaatacacttcatctttgaattgacttttactttcttccactgctccaaatttttgcgaaaaggatgctttcaaataccaactttcaagaaacagcaatattaaattctgaaagtcttcttttgtcatctttatctttgattcatcatagaattttgctatctctttacttaatgattgatttaaatcttgtatttgtccgtaaatatttccagaaaattcctcaggcgtattagataattgaacgtacattctaatatacctttcttcgatgtcgaaaataaactcaaataagaattgatataaagcatcaattgaatagttcgatttattttgattcatcataataatattattaaggtaatcaaaacaacatttaacactttgttcgtaaatactttttttcgagtcaaaatggtaatataaactcgctttctttatatttacacttttagctatatcatcaagtgttgtaccgtcataccccttctctgaaaataaggttattgcgttatcaataatcttatccttcaatttttataaccccctactgaaaattaatcacactatgttacaggaaaattaagttgcaattacaaatatttccgtttaattataacaacaatctattgcaaattaaaatactatcaattaccatatggcttacaacctaactaacgaaaggtaggtaaagaaattgcaattttttaactttttgcttttttatcctgtatttatgtctatttactggattgtcggttcaatttatttctattttaccagagaaattagatattcattgaacaagaagcctgacataaatgtggatgaattagaaggcattacatttttacttgcctgttataacgaaagtgacacgattgaagatacgttgtctaatgttcttgcactcaaatacgagaagaaagaaattattatcattaatgatggaagttcagataatacagcagaactcatctataaaatcaaagaaaataatgactttattttcgtcgatttacaagaaaacagaggtaaagccaacgcactcaatcaaggcattaaacaggcttcatatgattatgtaatgtgcttggatgcagatactatcgttgatcaagatgcaccatattatatgattgagaatttcaaacatgatccaaaacttggtgcagttacaggtaatcctagaattcgaaataagagttctattttaggtaaaattcaaacgatagaatatgcaagtttaattggctgtattaagcgaagtcagacacttgctggcgcagtcaatactatttcgggtgtcttcactctatttaaaaaaagtgcagttgtcgacgttggctactgggatactgatatgattaccgaagatattgcagtttcttggaaattgcatttacgtggatatcgtattaagtatgaaccgcttgccatgtgttggatgttggttccagaaacattgggaggtctttggaagcaacgcgtgagatgggctcaagggggacacgaagtattactacgagacttttttagcacaatgaaaacgaaaaggtttcctttatatattttgatgtttgagcaaatcatctcgattttatgggtatatatagtgcttctatatttaggctatttgttcataacagcaaacttcttagactatacatttatgacatatagtttttcaatatttctactatcatcatttactatgacttttataaacgttattcaatttacagtcgcactctttattgatagtcgctacgagaaaaagaatatggctggactcatatttgtaagttggtatccgacagtatactggattattaacgcagcagtagttcttgtcgcatttccaaaagcattaaaacgtaagaaaggtggttacgcaacatggtcaagcccagacagagggaatacccaacgctaaaatcatcgctaaatattgtaagagaaacagcacttatcgctatatcttgtgtcttttggatatattgtttagttgttctactcgtttatattggtactatatttgaaattcatgacgaaagtatcaatacaatacgtgttgctttaaacattgaaaatactgaaattttagatatatttgaaactatgggcattttcgcgattatcatttttgtattttttacaattagcatattgattcaaaaatggcagagaggaagagaatcgtgaagtatagaaaatttataattttagtgttgagtatcttgatcatattgcctgtaagcacactggatggtcatcatattgcaaatgcagatgacgattcacctaaaaaactgaaatataaagaaaatagtgctctggcattaaattatcaccgtgtaagaaaagcgaattttctgaataattttatttacttcttttctagtagtaaagaaattaaaaattatagtgttagtcaatcacaatttgaatctcaaataaaatggctaaaatcacatgatgctaaatttttaaccttgaaagaatttttatattacaagaaaaaaggtaagtttccaaaacgaagtgtatggattaactttgatgatatggatgaaactatttatgaaaatgcttatccaatcttaaaaaaatataaaataccggcaactgggtttattatcacaggtcatgttggggaagaaaactttcacaacctcgatatgattagtaaaaaagaactaaaagaaatgtataaaactgggttatgggaatttgaaacacatacccacgatttgcataacttatctaaaaataataagtcaaaattaatgaaagcttctgaagctacaatcataaaagatttaaacaaaagtgaaaaatatctaactaaaaactttaaaaagtcgcagaaaactatagcctatccttatggcttgatgaatgacgataaattaccggtaatcaaaaaagctgggttaaaatacggtttttcattagaggaaaaagcagtcactccgaactccaatgattattacatccctagaatattaattagtgatgatgcttttgagcatttaattaagagatgggacggattccatgaaaaagattagacttgaactcgtatatttacgtgctattatatgtgcaattattattatcacacatttacttacacaaattactttaaaacatgaaaatatggagggtggatccttagtgttacaattttacattcgtaatattgtgatttttggtacaccttgctttattatcttgtcacagttactgacaaccttgaattaccaaaaagtcacctatagatacttaactacacgcgtaaaatatatacttattccttacatattaatgggattgttttacagttatagtgaatcattattaacagattcaagtttcaataaacaattcattgaaaatgtcctattaggtcaatggtatggctattttatcgttgttatcatgcaattctttattttgagttatatcatttttaaaattaactataacctattcaacagtaaaatattattattgttatcttttattttacagcaatcatttttatattactttacgaacaacacagcgtttcacgataccgtgctacactattatccattaagtgaaaatactataatattcggatggattttttatttcttcttaggtgcatatatgggttataactacgaacgtgtattaaatttcttagaacgttatttagttattatgattgtattagctgtagctacttattttgtgtttattgcgttagcaaatggagactattggaacgttaccagcttttcatattcattaacaccatataatagtattatgtttattgttatcttgggtatttgcacgcattttaaaacaatgttatttaatacgattcaaatgattagtgctttctcattctttatttatttattacatccaatcattctagactcattgtttgcatatacaaatatatttgaggataatacaatggtctttctagcgatatcactactattcattttaggattatgtataggtgtcggcatgatattgcgtgaattctatatctttaggtttattattggaaaacaaccatataaattgaacattaatgcttattaattattaagctatgttaaaaacacgcggtgggcgaaatcagtttgaattgactgacttcgttttaccgcgtgtttaatattgttatacatatattctaattgcacatttaaacttcgtaaatgccaatgggagtgggacagaaatgatattttcgcaaaattatttcgtcgtcccaccccaacttgcacattattgtaacctgactttccgccagcttctatgttggggccccgccaacttgcacattattgtaagctgactttccgccagcttctttgttggggccccgccaacttgcattgtttgtagaatttcttttcgaaattctttatgttggggcctcgccaatgttttacttgaataattcttttagaattctaaataatgatccgattaattgaaagaagtctgcagtcattattaattcctccctttactttataaattatgcttgcttagtatcagtcagcttttcagttttcactaaatcgtctgctaaatgatgccaaaaatcttgtaattcttctcttgtgcgcactgtatcagaactgtcttgtcctacaaagtcaacatgatcccaatcatgttttgtaggcgtcacttgccaaatgcctttttgaattttatctgtcgcttttgtataagcttgattaaatggatgttgagaagaaataacggatactaaaccatcgttttctcgccattctttttcagtagctttaccgattaagttaccagtaatcacaaatgggaaaaacatatttaagtctgctttttgtctatcgctatttaatgctttgtgcgttgcttcaccagtgtatgttttatacacaatgttagggttcaacgacgttttacgatttaaatctgttgcaccctcacgcgtcagatcgtaaaatccattatcttttgatttccataaattagattgtttaacgcgtttgacataatcaatatatgattcatttggcttctgttttagaccccattgagccaacccgaagtctactcttgaatttttattaccaaacattttaccgatatcaaatacgatttgtctcactaaagcttcattaccagctaaatctgatgcgtgtgtaccattatgtggtgttcctaaagtagtaattgatgaaatcatattgtcatgattacctttgaatagtggagaaatttcgccaccatgtttcttttgatactctatttcttcacgattaccattacgcagtaattcttctagttgacgtatcgtttgaccgcccatactatgtccaactaggtgtaccttctgtcctggtttccagtctttgtaaattccttcgtatgtttttccataacgttcatgtccatattttgctgcatgtgctgcaccataatctacacgaccgcctttgatataataataaagttcaactgcgcggtcatagttacttccaaaagcacttatacttgcttcataagctttgtaaccattttcttctaaatcttggcgaatgttcattttattaccgccccaataatgagctaacactgaaggattaatatcatctgtaaacccattgaaaccatgcactaaaacgataggatcctgatttttatactgcccttgtttggcaactttattcgtttgatcatctttcgcttttgcagtaagttcctttgtccctttgtttggtaacgttgctactgcactactttttaataaatttaatccatttttcttgtcattgtcctttgttggttctactggtgatttttgattgttttttaaatctgaaactgatagtgttttttcgtctttttgaggtttcacttcttgttcattgttaaaattgtagttagtaattttatcattcgcttgattattttgttgtggttgtactttctctatttctgtctcattaacaatttctcgttgacttgtttgatctaacttatttaatgatggtgcttcctttattcgactttgtgaaggtagattgttattagcgtttgaatcttgactattatctgcctcttttgactgttgctgtgacgccactttactttgtttaccatcattaatagcctgttctaacccttgatttacatcgctaggattagcattgttattttttgttgtatcacgttgaatatttttattattaagcgatgattttttatcatcctttagttgatctttattcaaatcatctgttttacgatgattttcttctgatattgttttatcattatgcaagttcttagttaaattttcagtatgttgctgttcgtcaacaccgttttcacgttgataattagcattttccctagtttgttgatccccaatagattgtgctgtaactgtatcctcctgtgaatttcccatattcacttgcttctcagctgcttgtgcttgtccaccacttaaaaatagtaatgtagctattaaaatggaagatgcacctacactaaatttacgaatactatacttattttgacttttcatcattgtcagcacctctatttttttattttagataaacaaattgataattattcgaggaataaactcaaataatttacttaaccaagcactcataatgaccatcctttctattgtttaatttgacgagaaagcgtttacatttgtatttaaaaaatatattctccaaagagaatttaaagtgtatacgctaatcatttcaaattattaattaatattatatttggcaaaatttaattagtcaataattagacacaatttaattatgcaaattgtaacttttttacatatatcttttttgatttttaatatttacatgcttggggcttaattccaatgatgtattatttttttagattagctatatggggagatttatgagctattacagttattatgtttgctggtgtcgtattttaaacctaaaaatatcatcccatccacaataattgtatcaggataaaccgtaatacttgttcctaaactaaatatatacagttaattttcttccctcaaagtaagtatcctactatttttaatttattgtttaattactcttgaactacctttaacttaatctcgaatttatgatgattagcataaaaatacatcccataaagttagttttttagtctaactttcgggatgcacatcttagttctaatggagattgtcttttaaataggctatgacatttctatttcaggctagatatatttttatttatagtataaatacaaagaatgtaaagacaactatgatattaataggtagtaacgacaaacataactctttagctttttcgccattttttcccttcataacttcattatatcgattcatatacttttcaacatctttaacagtgacatctattcctgagttgctcaattcacttttcataattatttttggtttcgtattgtgattatccactacttatctataacgcgtttgcaactttagtaccatcacagcattcatagttaaaatatgttggtgtcgtattttaaacttgaaaatgtcacgttttccacaatatttgtaagtgtataagccatgatccgtttctctatatctcagcccatacttgttttaccactgttcgatattttgtcgttcgcctttaaagttattgcgcttatgatgtctacgcgctaattctgcctcaatttctgaaaaatcgacgcctagcgcatgcatcaagacaaataaatgataaagttcatctgctacttcacttacaaatgcttttttgtcacctttaattgcttcaattacgacttcaaaagcttcttcaccatattttttcgtaatcttttctataccttctgttaataaatattttgtatatgacttttcattattggattgggcactatcttgaactgtctgcgctaatgtttgcactgaaaatggaacttctgtgttgaaacaactttgactgcctgtatgacatgttggtccatttggtatgacatcaattaaaatagtatcattgtcgcaatctacatgaatatctttaacacgttgcgtatgaccagatgtttcaccttttgtccatagacgttgtttcgaccgcgaatagaaacatactacaccatcttctatcgttttatcaaaagcttcttgattcatataacccaacatcaatacttgttttgtttgattatcttgtaaaattgctggcactaaacctttgctaaaatcaattttgtaattggtcatcttactgctatacctccttgccgtatcacttctttaatagattgaaccgtcgtttctcgatcatgtaatatacttgcagctaaacctgcagaaacatccgtctgatcaaataattctacaaagtgttgtgcattgccaccaccaccagaagcaatgattggaatatttacaagagacttaatatttgctaggtgttcaatatcaaagccttgtttcataccatcatgtcccatacttgtaacgaggagctcacctgcacctaactgttctacttgctgtacccagtcatatactttaatatttgtcatttttttaccaccagtcgtacaacaataatgtgcttttctttcaggatcataatagctatcaattgctatgcagatgcattgtctaccgaatttatcactcgcttgtttaatgagctgtggattttttaaagcacttgaatttaatgatactttatctgcaccatgatttagcaattgggtaatatcatcgagactttgaatcccaccccctacagtaagagggataaacaagcgtgacgctgtctgttcaatcacttctagcattaagctatgaccctcttccgtcttagagatgtctaaaaatactaattcatcagcacccgcttcattgtaatacattgctaaatcaacaggattcccaatatcccttaatcctttaaattgaatccctttaacgacacgaccatctttgacatctaaacatggaatgatacgttttttaatcattttagcccctcccaaaaagatgcttgatgtgcagcctttcctataatagcagcgtgaacatttagcgacgctaatcgttgaatatcttgctgatgtctaataccaccggaagcaatgacaggaatcgtcgttgcctttactaattgaccagttaattcaaagttaggtccggacattttgccatctttagcaatatcagtatatataatgccgccaagaggtatatccgataaccgtctcacaaaactaaataaatttaactctgtgtcctcttcccatccgttcactttaatatcttctccataggcatcaacagataaataaatgcgacctggaaatgtatgtgccatctctttaagccaatcagtatcttgaatacctttcgttccaactatgcaataattaatccctgcggcaaagtagtccatgatttgtgacttcgtacgaatgccaccacctacttcaatatctttggttgttaatctcctcaatgacttaatataatcaaactctcgggcatgctgtgccttagcacctatcaagtcgacgatatgaatacgattcacacattcaaattgactatagtaagcaatactttcttcagccgagcgtgacattttttcttcactatcatatttaccctctgttaacctcacacttgttgacccaatcaaatcaatcgctggccataattcaatcatttataaatcccccttgtattgcctgacgcaaaatttgtaacccatatgtaccgcttttttcaggatggaattgaataccaatataattgttaaattgaacaattgccggaatatcagccccatactgcgcatatgcaattacattttctgacatcggcgcttgataagaatgtacgaaataaacatcttgatttaacatagggtgcttactcactaaattattccagcctaagtgtggcactgggtattctgtttggatacgcgaaatatttcctgggataaaccctaatccagatgcatcgccttcatcactatgctcatacattaattgcatgcctaaacaaataccaatcatcttcttatcagtattcttagccaatattgcattgagatttaatcgctttatctctgacatcgcatctttaaaatggccgacaccgggcaatatgattgtttctgcttgatcgattatttttgaggtatttgagacaaccacctcataccctaaatgttcaatagcgcgttttacattactaatattccctaatccataatcaacgatgacaatcattcaatcacacctttcgatgacggcacacgctgatcatcagttgcagttagcgctatgcctaatgcacgggaaaacgctttgaatatagcttcaatttcatggtgtgtattacctccacgaattaaatcaatatgcgttgttaatcttgcattgattacgaccgctctaaaaaattcttctactaactccgtatcaaacgtaccaactttttctttacttaatgatgcattgaatgataggtatgggcgcccacttatatccacaacgacacgtgctaatgtttcatccattggaatgtacatcgttccataacgaacgaaatgctttttatctttaatcatttcaagtaacaattggccaatgacaatgccgatatcttcagttacgtggtgatcatctacgtcaatatcaccttgtgcctcaatgtttaatgacagaccgctatgaaatgtaaacaatgttaacatatgatttaaaaagcccacacctgtattaatatgcgatggtgactggtcatctgatattgaaatatttagttgtgtttcagctgtgtttcgttgtttttgataaatcatattttgcgctccattctttaacaatttcttctaattggtttaactgtggtgctgttgcaattgagtatcttacatagcccttcattaccggctcaccataaaagcgaggtttaaatccttgttcatatacgtattgtcctaattgttgcgctgctgaacctttagtaagtacaaaattggcatttgatgggaatactgacattttatctgcaacatgtgtatcaaatatttgttttaactgctcagctaactgtcgttgcatcgttaaaaatactcttgtctcttctctatgtctaaaaatataagtcgcaatatttagcgtaaatacatttaatggatatggatgttctattttttgaatacgctgtatcgttccagcagtactaattaagacacctaatcttaagccagctattccaaacgcctttgataatgtgcgcattcttaaaatgtgtggtgccatttcaacgtcatatgccatgccataatctaaatatgcttcatcaatgacgaagtatccgtttaatgctttcatcttatctgcaatagctgttaaaaatgccgtatcaaattgcttgcctgaagggttatgtggattactcataataaaaaatgatggttgtacttcatcgattttcgttaaaatggtttccaaatcaaacgttaaatctgatcctgcatctacaaatgcaatttcacgatttacttgtgccgcatatgcttgatacataaaaaaatcaggatttagcgttaatgccggaccttttggcatgattagcattaacttttgaatcaattcatcagagccatttcctgcaataatttgttcaggcaataatccgtaaaacttagcataagcttccttgaattgttcatatgctgcatcaggatataaattatatggcgttgcactaataatagacgtcattgttttttcatccaacggcgtaactggactttcatttttatcaatataaatcatttcaattacactcccctaagactgacgtattaaaatagactgctggtgattgtataatgcttcaacatgagcaatatgttgtgctgaatcagcaatttgttcaaacgtatcttttgataaatggatgaccgtgttccgtgttaagaaatcattgaccgataacccattggtaaatctagctgttctatttgtaggtaatacatgacttggacctgcaacgtaatctcctatgacctctggcgaataatgtccaataaacaatgcacccacatatttcactttttcaatatatggttgaggatttactgtttgaatcgacgcatgttcaggcgcgattgtattcatgacatggcatgcttcatcaaaattactagcatggataaggtagtgttgattagcgatacttttagaaacaatgtcgtatctgtccacattaggcaatgctttagcaatacgtgattctaaatctttaaggacttgcgcatcttcaccaatgacatatgtacgtgctaattcatcatgttctgcttgcgcaaatacatcatatacgatggcatctaaatctgcggtgtcgtcaataatcagtgctatttctgttggtcctgcaatttgatcaatacctacctgtccaaataaatattttttggcatatgcaacaaattggttacctggacctacaatcttatcaactttaggtatcgtttctgttccataagtcaatgcagcaatactttgagcaccaccaacttgaaacacttgattaacttgcgtaatataacatgcagctaatacctcttgggatactccgttaggttgaggtggtgtcacaacaacaatattttctacacccgctacttgtgctaaagtcgctgtcattagaaccgttgatggataacttgctttgccaccaggcacataaatacccacactttctagtggatggtatatttcataacactccactgattcttctaactgttgattcgtctgcttaatactttcttgatatgctttaattctttcataactttgttgtaatgcttgttttgttttttcatctaatgtgtcaaatgctgctttaatttgttcatgactaatttctaaatgatctgttttcgtatgatcgaatgttagattatacattttcaaagccttatctccatgaactttaacttcctgacaaatatcgcgaataattggatacaatgactcatctaatggtgcttctaatgaaaattgatttaaaaattgttgtgcattaagcattggcaatagacacctccaaagagcgaataaattgctctattaattgtgattttttaaaataagctgctttattagttattaatcttgcattgatatcactaatatgttgcttttcaaccagtccgttcgcttttagcgtagtacctgtttgaacgatgtcgacaattccgtctaccatatctacgacacaagctaattcaacagaaccattcaatttaatcaattcgacatcaataccttttgatttaaaatatgtttcagcagtatgaacataactcgttgcgattttacgataattggtcgtttcaggtttcgctgcaaccgcaaaatgacatgctccaaaaggcatattcaacaaattattaacattatattggcgctcatctaatatgtcgctaccaacaatgcctatgtcggccattccttgttccacatagattggcacgtcacttccttttactaaaatgcattcaatattatctacacttaataataattggcgttctctattttttaatgtttctgataatgtcgtatattcaattacatctaaatagttaattaaactatccattagacgtcctttggctatggcgattcttaacattgtgcatactcccttacttaaagtgttaatcctaatccaaacccttcgatgcttcctttgtaataaccacctgttaaaactcgagattcattttcagcaaaatgacattgaataaataagcctgtgtaataggatctaggtggctgcgcagtaatatctaaatggatgtctttgtaaccttgtgtatgtaaccaacgttcccatatttttaattcaacgagtgctggatggtcatttggaatatagtgttccaatacatttaattgttgttgcgtattctctttcaagatttgcacgattggatgttcagtcgacaaatatgtaaccagtcccgataaattacgttcctcaatcattgatagtatgtctggtgtttgtaacgatttatcgagtaaggcatcaagcaattgataatgtcccaatacaacaaaatgcacgttgtctctcaactgctgttgaataaactgaataaatagctttaagctctgttgtacattcgctaatgatggtgcatagttttccaaacccacttgtacagccgcttcattattccgaatgattaaacctgtgtatgccacttttgttgctgcagttggatacattgagtaataacgcaataattgatctgtaaaatcatttcgaagtgcataaatttgatgctcatgttgccaaaaatttcgctcacccatctgctgcaaatcctcatggttcaattgtttccagtccaacttttcaaccacactaaaatcaactaactcataatccgctttattaaaatattttaaaaatgctgtttccgattcttttaacgcaattaattgttctgaattattcactcgaccaccctttactttcaatactgtatttaaaatcacttggtattttcgttgtttactttacttctctaccacactaaagtgtaatatgattaataacttatcatttttagcaatacattacaacctttttcagaaaattcggtgtattgtttttaaatttttacaaaagaaaaaggcaagacatttgtgcctataaaaatgctaaaccaagatttttatattgaagttgtacttcttgcacatattgtgcttgccttattatgtaaagttattttctttctatctttttattaaatttaactattcttcataatcccgattacctttaaagaattgtctatcttgtttactatatacattttcaggattaaaaaacggtttgagtttatatttaaattcaaataagtttagaccatcaatcgcaaccctatcttggtaaacgttcgttgctgatatatctgtaaaattgtttggaccgacacctgcaataaacttaaactctgcttcatctaccaaataatcatacgcttgtgtatgtctatcctgtgcgccatgtggaaatacaaacatatctgttttacctacaattggttcaacttcatctttccatcttttagtatcacgtttaataccttctaaagatgttttttcaaaattaatgtgaccatatgaatgactcgcaaatgaccatccatcccgtttcattgcgcgaacaacttcctcagctgcctttttattctttgtataatctttactcgttaattcattcgtgcgataacctaatacgccctcataaccggttaaagcaacaacacctttttcaccatttaaagaaaaatctggatgctcttttacaaatttatttaaaattggcacgatatcattgtcatcagaataagtagcatgaccttttttgtctgtagtttcagaaacaacatgtttatttttatcgagtactaaacggtcagcataaccatggtgtctcatgtaactatagtaattcatatcatcaattgagatgattagtggctttttacctttcggcaattttatttttttggcttttacatgatgagatgataagtcgtatacatcatgtggattaacgatgatgtaattatttttatataattcgttcaatgattttttaaattcacttacagtaatcatccaatcattgttgcccttagcttggtgtgtatctcctgtaaacgcaacttttgggtctgtaattaatgggtgataaaacacatgataaacttggccgtgatatgtttcccaatgttcatccattttcgatttatgctttgcatactcatttggattaacagatttattttgagctttctcattttgcttggaacagctatatagcaatgcaactgataataacagaaaaaatagcaataaatattttttatgcattaaacattctccctatgttttattatgcacaattataacatttttattatgtggctcataactttttaagaaactgttgggattttaattttattttttagataatgtcatagtattttatttataaaacacaatatctccttgattgataatgtcgtccatagctttgtctcgcttgaatttaagcctttctgctaaatttattgaacgttggttacacttatttgtcctgataacttttactgtttcttgatcgatataattcacaaaatttgtgattgctgtaatagcctcacatgcgtacccttgtccttcaaaacttggatgtaatttataaaataaatttaatactgtttcttgctttaattgtcgatattcatatccacaaataccaataacactacaatctattttttttaccaatacaaagtaaccaaattgatattgttgccaatggtttcgccatttttcaatccaccgttgtgtgtctaatttggaattatgtaaacctttgggagtgtatatatttgcttgtggatgactacaaatattataaagttcaattaaatgcgaggaacttggaatcattaaatttaatctttcagtatttatcattaaatgtctccctcctatttctatttaaagactatttatatgaatgctaataccacgggttgaaatatcgactattatttaaaaagaataatgtaactactaacatcagaagtattaacgtcaaacacaaaacaacataatcatctttttttaattgttttttgacgtaccaggttctccttttatactgtccgaattgtcttaactccatagcagtactaatagtgtcaattctttcgatactagaaaatattaaaggtaacacaatgcgtttgatacctttaacacggctagtaaatttcgcctttttcgaattatcatatcctcttgcttgttgtgcttgtgaaatattaaaatatgtttcttgaatatctggaatataccttaatgctagtgagactgcgtaactgattttataattcacacctagctgatttaaacttgcagcaaaatgactcgaattcgttgtgaataaaaatattaacgctaaaggaactgtactaatatattttaatattagattaaaaagatagaataattcctgtgatgttagcgtaaatcgaccaataccattgattaactctgtacgctgattataaatcttcacaccatattcaggatcaaatatgtatacggcaataatatttaatattgtgaaaaacagaatgaatttaacaacaaaacgaacttgtttccattcaatatgagcatatttgaacaataaaatagatgaaacactaattaaaattaaatatcttgtgtcataagtcaccattgcagaaatagaaacaactaataagaataaaagtttaacagtcgcatttaattgatgaatacgactatttcccgggtgaaaacctatagtattatattgattcattggcgtctcaccttcctatcatggttaataaataattgtactaatttctgtggctcgctaatccctatatattcggccatttcaaatagcgatgtttgtctcaatgatgcaatctcacagatttttttatcatttaaaaccaatactggcgtggtatcagcaacgacttgaccttttgataatacaactgttcttgaactatactcagacaataaatgcatatcatgcgtaatcataataatcgtcttcccttgtctgtttagctcaattaaaaatgacattatctcattataatgatagaaatcttgaccagcagtcggttcatccaatatgattatttccggatttaagactaaaacagatgctatagtgaccctctttttttgaccatagcttaaagctacaattggccaattccgaaatgcataaagtccgcatattttgagcacattctctacccgtatctttatatctgattctttcatacctcgtgctcttaaccctaatgctacttcatcgtaaatcattttttcggaaatcatatgatttggattttgcatcacataacctacgaattcagatcgttcgctaattgacaattgattaaatcccctattacaaaattggatattacctgttatatctaaaaatccacaaattgctttagcaagtgttgatttgccggcaccattgtgaccaactatactaagcatttctcttctataaacatttaattgaacattattaagtacactattactatagtcactatattgaacacatacctcatttaattctaatagcggttcagatttgtacttattatcattatttgcagatgtttcatctatccattttttcactttaaatttaacatgttcactcatacaaacgtcacgtaaattcgctaagttatcaatggattcgacatctacttctgcatatttaagcgctgtacagtataatggttcacgtatgcctgcttctttaagcttagatgattttagcaaatcactaggcgttgtattagcgatgatttttccatctttaaaaagaagaactctatcaaacgtatcatctaatgattcttctaatcgatgttcgacaataatcatcgttgactttgtttcttcatgaatattgtttaacaatctcagcgtttcatgtcctgtcgcaggatctaaattggccagcggctcatccaatattaaaataggcgtacgatggattaatataccacctaatgaaacgcgttgtttttgacctccagataaatcttgcggtcggtgatttaaatgttctatcatgccaactttttcagcccaataacttacatttttcttcatatcatcttgttcaacacaattattttctaataaaaaggccatatcttcagctgctgttaagcctatgaactgtccatctgtatcttgtaaaactgtaccaacaacattagatctatcatgtaaacaactaacggttgcatcttgattatttatatatagttccccagttatgttacctttagttttaaatggaattaatccgtttatgcaatttgcaaaagtcgatttaccactacccgaagcaccaactactaatactttttctcctggataaatatcaacatttattttctgtaatgtaggtgttgcttgactatgatattgaaaactaaagtctttgaacgagataattggttcagtcatgatatatcattacctttctacattcatttacatatctgattcaacaaaatgattattctttacgtaaactacctttttttatttgagatgaagcatatgcttttaataatattgtcccaataatgccaactgaaataatatttaatactgcagagataacaccttgtgtataaaccttgttagccggttcgttataaatcaaaatatctaatgttggtgcaataagtgcccagcaaataatattcgcaataatttgaccgatattaaaataaatcatcgatttcctagaaaatcggcctgaagaaagatttaattttaggccaatccatccatataaacagcctataattcctgaacaaataacccaactccaccaagcactaccgtatgtcgtgaaatctttaatagcgtgtccaactaatccagtcattaaaccagcaaaaggcccaaatattgcagatattaatgctaaaaatgcataagatgtttctatattcgtattaggaaaacctgttggtattacaacaaaacgccctaaaatcacaaataccgctgctcctataccaatcgcaacaacagttttaactgaaatatcttgttttttcatcttcattactccttacataaaaaattcactaaattgatggtgctttagataaatgaatcgtccaatcatttccagtaccaatatgatataaatctgaaaatgagtcttgattgaccgctacaccaatatttactagcgagttaacatacacaagaggttcacccacattaacatctgcaaacgatcgcgcaaatttaataatattttgatagactttcttatcttgatgataaattgttaccaccaaattattaccatgaacaatttccaaggattttaagaatgccaatggaatatttgtccataatgacccaaatctgatatctaaaatatcaatgcttcctgtaacagaatcctcattttttgtcgcttctcttatttctaatgcctcaatactatcaacattaattgcctgaccgagacgttcaaacgctatcttatttgcagctaatctcgcaccattgtatgcataaacatctctaccatgaaaagtatgactttcttccgaatgaggcaatcggcttttcacttcatcaatttcgataacttttttaataccttcgtaatgtttaatatgacttaaagaaccattatcaggtgtaataatgtaatgacctgaatatgttaagcaagcaatgctccgcctatcactacctacacccgggtctaccactgatacaaaaactgtgcctttaggccagtattttacagtttgatataaacgatatgacgctacccaaatgtcatacggtggtatatcatgcgttaagttttcaacacgtatatcatcacttacagtatatgcaactccatacattgcacttacagcgccatcactaagtccaaaatctgattgcaataccaaataatttcccataaaatgcctcctttttttaaaacttcaaaaaaatattatctacatatttaatgttctgtattttgaattttcagaattatattaaaatagtacgagtcacttgatgcaaagtcaatagtagtgactataaaaatgataataatagtcagatttatctcattaactaaatttcacggacttgtaatcacttctttatgtttgaattaattgactagggtataacaatagtgtggtgttttataggtcattctttaaatacatcacagaaaatattcgaattcgaaataaaatgcttgcatctttgttttttaggtggtattgtatgtatatcaagtataaaaaatatatctaagagataaaaatatggaggttttatattatgactaactttacttttgatggtgcacacagtagtttagaattccaaattaaacatttaatggtttctaaagtgaaaggttcatttgatcaatttgatgtagctgttgaaggagatattaatgacttcagtactttgaaagctactgcaacaattattccaagctcaattaacactaaaaacgaagcacgtgataaccacttaaaatctggtgatttctttggtactgacgaatttgataaaattacatttgtgacaaaatcagtatctgaaagcaaagttgttggtgatttaacaattaaaggcatcactaacgaagaaacattcgatgttgaattcaacggagtaagtaaaaatccaatggatggttctcaagtaacaggtgttattgttactggtacaatcaatagagaaaactacggcattaactttaaccaagcacttgaaactggtggcgtaatgctaggcaaagatgttaaattcgaagcatcagctgaattctcaatctcagaataatctcattacacaatcctcattgttttaatatatatatacgaaatgccaactatatcatccctaggtatagttggcattttttaacttctaaattaaaaatcatatttaacttaattgataataacaccataaagtaacaatgatattgatgaaattaaaagtaatacactagataaaatatctagccttttatcttttttatcccttattctatttgtcaaaagtgctccaactgcaactaaaactagtattgtacaaaaaatataaatagccaaaataaacaactccttattaaattggcattgatttcattagaaataatcaagaaaattcttctttatactttcttatattaaatattgcctatttacgttatacaaaacttcattttacaaattgaagcaaattatatttaacttctaacttaaaaatcgctaagatttaaacttatatttagacgcctttcattcaggtaggtcttattgaaactgaaaactttgatgaccttttgcaaagccattaactgtataaagcatagatcctccgcccatttctatatcattggaacaaatgatgagttgatttgtgtcaggtataaattgcggatgcgtagaacgtaacatatgcccttcatctcggcctggtatcaatatttgtcctattggataaccccttttattaaaaactaatactcggccttgaccatacattgccacatataaattatcgtcactatcaatacaacatgagtctggtccttcatgacctgtaaaatagtacggtatggtagctccaaatggttgtatcgtcacaccatcatcttcaagtgcaatgcgatgtaatcgattggctgtagtttctgttacccatagtactttttcatctttacttaaagcaataccatttgctacgctaatattttgaatgataggcgtcactgttctaaagtccggcgcaacataataaacgccccctagtggattggtagagtatcctctaaaatctgtaaaataaaatccacctttagaatcaaataccatgtcatcaatacaataagttgttgaaaaatcttcaataatatcttgtatgttgtcaccattttctgtagctgcaaaaatgcctcctgtagatttaaaatctcctaaataacaaacgaataatcggccatctttatgtattttgattgctgcaggattcgctttatggcttacaaaaggtcgtttgatttccttcgtttcaggattgattttgaaaatattgccttcgaatacatccaataaaaagagttgtccctgccgatcaaagttcaatccttctagctgcaatccttttttggaaatttcaagccatggttcagctgtaattgtttgtaattcactttcagatataattggaacagcactattggacttcccgctataaaataatgtaggtaaatcttgttgtgacatcatgatcattcctttcatttcattcgttttaactatcattttcattttaaacaagataactatcaaataaaatgataacggtttcatttatctattttatcggtctagtggctgatttcaagctagaaatattgaatgacaatacaactctgttaaaatgatggacgtagataaatatgcgtattgacgctttattttaaaaattaacatgcttataacatgtttttagaaggagattaacctatgaactatcaagttcttttatattataaatatacgacgattgatgaccctgaacagtttgctcaggatcacttagccttttgtaaagcacaccatttaaaaggtagaattcttgtttctacagaaggtattaacggcacattatctggtacaaaagaagaaaccgaacaatatatggcacatatgcatgccgatgaacgattcaaagatatggtgtttaaaattgatgaagctgaaggacatgcttttaagaaaatgcatgtacgtcctcgaaaagaaatcgttgctttagatttagaagatgacgtcgatccaagacacacaactggccaatatttatcacctgtagaatttagaaaagctcttgaagatgatgacacagtcattattgatgcacgtaatgattatgaatttgatttaggtcatttccgaggtgcaattcgtccaaatatcacacgttttagagatttgcctgactggattaaagagaataaagcgttatttgcagataaaaaagtggttacgtactgtactggtggaattcgatgcgaaaaattttctggatggcttttaaaagaaggtttcgaagatgtagcacaacttcatggcggtattgctacatatggtaaagatcctgaaacaaaaggtgaatattgggacggtaaaatgtacgtatttgatgaccgcatcagtgttaatatcaaccaagttgaaaaaacaattattggtaaggattggtttgatggcaaaccatgtgaacgttatattaattgcgctaacccagaatgtaataaacaaatattagtttctgaagaaaacgaaactaaatatttaggtgcatgctcttatgaatgtgctaaacatgagcgtaatcgttatgttcaagcaaataatattagtgataatgagtggcaacaacgtttaacaaactttgatgatttacatcaacatgcttagttttaattaaatacctttcaaaacacgctttgaaaatccgatttataaaggtttttcaaggctgttttttatgcgcatacataacctgatatgtttttaattatgcgcgtgttatactaaattaaattttaatactgcggggtgtcttaaaatgcacattttagtaacagggtttgcgccttttgacaatcaaaatatcaatccctcatgggaagctgtgactcaactagaagatattattggcacacatacaatcgataaattaaaactaccaacctcttttaagaaagtagataatattataaataaaacgttggcatctaatcattatgatgttgtactagctataggacaagctggtggtagaaatgccattaccccagaacgtgtcgccattaatattgatgatgcacgtattccagataatgatgattttcaacctattgatcaagccattcacttagacggtgcgccagcttatttttcaaatttaccagttaaagcaatgactcaaagtattattaatcaaggacttcctggagcactttcaaatagcgcaggtacatttgtttgtaatcacacactttatcacttaggttatttacaagataagcattaccctcacctacgattcggatttattcatgtgccatacataccagagcaggtcattggtaaacccgatacaccatctatgccattagaaaagatagttgcaggtttgactgcagccattgaagctatttctaatgatgaggatttacacctagccctgggcacaacggaatagttataagtacaccaataaaatacattccttaaatgactaacaactttgttaatagggtaatacttacggaagtatgttttatttatggggggaggaattaataatgactacaaaaacggtatttgatgtcattgatatgggtttaggatatttagtaaatgtgtatgatacttggaaagttgaaaagatacttgatgattatcataagcctttttctaataccattcattggcaatttgggcatgtattaacaatttttgaatcagccttagctgttactggtaaagagaatattgatttaaatatatatagacctttattcggaaatggttcgtctccagatgaatggaagggcgaagtaccgagtattggaacgattttagaaggtcttcaaacattacctgaacgtgcacgaaaactaactgaagatgatttagcaattgaattgaaacaaccaattgttggttgtaataacttagaagagttattagtattaaatgccattcatatcccacttcatgctggtaaaattgaagaaatgtctcgtatattaaaaaatttaaaataaatattagcttattaaccgttaacaacacgttaacggtttttttatttgtttaaaaggccacttttagtctgcttacatacagattaaaagtgacctatttatatcatgtattatacatagaactaggaatagccttatctataaaaataattataatggtttatgagttaaatctttttcttaaaattaaatacaatcccaatatacctataaatacccatgtaatccatgaagttataatcttcataccagtttttggtaattcttttagaggattttcaggtttggttttattatctttaggttgatcatccttatccacttttgatggcttatctgggggagttggtttaactttattagagtgatcaggtttagttggtggtgttttgtcttttggtttttcaggatagattggtttattcggtttttctggcgtatatttattcgtcacaatcaagttacccatatcattgttatccacatgtgttgtataacctttaacttttgttaattcctcgactgtgtattttacttgttgaccttttgctttttcatctaatcctgcccacgtatgggtccagttattagattcatttaatgttgccgtttttcctgttgcttttccatcttgatataactcaactttaatttcagttggtcgttttccgtcttggttattattatcatcccaattttttgttactgttgccgatgtctctcctggtgtatacttgttcgttattgttgtaccgttgatgtctgttgtgtagtcttttacgtgatcttcggtcactgtatattctattttctttccttcatcatacttcggtaagtctttaaattcgtacttccagtttgtttcagatgtcacgtctaacgtttttactttctctccattagccaataaatttatactgactttttctggtctcttaccatcttgattgtctttgtcgtcccatactttttcaccgttaattgatgttgtttctggcgtatatttattcgtcacaatcaagttgcccatatcattgttatccacatgtgttgtataacctttgacctttgttaattcctcgactgtgtattttacttgttgaccttttgctttttcatctaatcctgtccacgtatgggtccagttattagattcatttaattttgccgtttttcctgttgcttttccatcttgatataactcaactttaatttcagttggtcgttttccgtcttggttattattgtcatcccaattttttgttactgttgccgatgtctctcctggtgtatacttgttcgttattgttgtaccgttgatgtctgttgtgtagtcttttacgtgatcttcggtcactgtatattctattttctttccttcatcatacttcggtaagtctttaaattcgtacttccagtttgtttcagatgtcacatctaccgcttttactttctctccgttagctaataaattcacactgactttttctggtctcttaccatcttgattgtctttgtcgtcccatactttttcaccgctaattgatgttgtttctggcgtatatttattcgtcacaatcaagttacccatatcattgttatccacatgtgttgtatagcctttaacttttgttaattcctcgactgtgtattttacttgttgaccttttgctttttcatctaatcctgcccacgtatgggtccagttattagattcatttaatgttgccgtttttcctgttgcttttccatcttgatataactcaactttaatttcagttggtcgttttccgtcttggttattattgtcatcccaattttttgttactgttgccgatgtctctcctggtgtatacttgttcgttattgtcgtaccgttgatgtctgttgtgtagtcttttacgtgatcttcggtcactgtatattctattttctttccttcatcatacttcggtaagtttttaaattcgtacttccagtttgtttcagatgtcacgtctaacgtttttactttctctccattagccaataaattcacactgactttttctggtctcttaccatcttgattgtctttgtcgtcccatactttttcaccgctaattgatgttgtttcgattggtttttcagtattagtaaccactaaaccattttcttttttagtatatccttctggtgttgtgtcttcaccttgagcatttacttctttaactaaatatttaatagtcttgccatttttgtcattttctggaagattagaccatgtcacttttgtcgttccatcttctaattttttaatctctgctttgtctactggtgttgtgttttgattgtcatcttgtttgtacaacttgaaataaatcgttggtttcactttttgagtgccttcccaaaccttttgagcagatacatcttttgttttttctatctcttttgcattttcaatagtcgtaaaatatccctgattatctgtatctttcatagtaaacggatattctttatccttatcaaatgtatacggtgctggcgcctctatttcttttaaaatatagtctccactaggcaacgctttaatattagcaataccgtttgcatctgttataatctcaatttctttttgattgtcctttacaactgatccatcttttttagaaagtttaaattttacattagctataggagccttggtatctttatcctgttttaaaacttttaattcaccttttacagtaccttcaataccggcattagcattaatattgtgcacagtatgattaaatgatttcccgttcacttcttccttaccatgctcttgataccaagcttgtgaattattaacaaactctttttgctgttcattcgtaattttggttttgtagttaattgaaaaactattatatgacccatagccttgtggaattgttacatcaattgtgttcttcgtattatcaacagttatcttagaacctggaaaagctttttcaaaatcagtaattgcatttgatccactataataattgctatgtgtacctgtcacattaatgtttaatgtgcttaaatctaactgctgtccaccttgaatctgatcctttatagtaatatctttcgatacatatcttttttcattattaatatttaaaaaccatcgtacatgtgtcgtatcttctggcagcatatctcccgttttataatagaaaacactacttgttcccgcttcacttttatgaaccgtaacattcgttgatttattcccagatgttatcgtagctactttgtcatctgaagtatttgtttgcgttaaatttcttccttgtacttcaaattctgcaaatcccgaaacatcacttaatttttctactttatcattgaatgtaattgttgctccgtctggtgtaataactgcttgacccacctgttcacctttaacagttaatggtactgttttactataaccctctatctttactgtaccgcttgtcggccatgccactttaatcgtgtcaccattttgtatttttacacttttatcgtcgaatgtcatttttactgtcgttttaccaccatcttctatcttagtcggtgatacagttaaatctgtaacattcgttgatgaaatatctcgtgctgccaatgcttcatttttattaaataaaggcgtgatgatatttaataacattataaagaccataaacttcaacacgttcttgttcataaaaacccctccttatactctatgtcatatccataggatactaatgataaattataaactaatttagttcatattcaatgaaatttattaaaaattcatattattattttattatgcaaaatatatacagtataacgaatacaagtgcatgaagttaacttgtatcaattaatttcttagtatattagttcatcttcaaaatcttttaaatttaataaataccatctataccagttcttcaccgattctcgaaaaataattatattaatgatttcgttaatttaattttatatttaattattactgtacatcttttgtagttagctttattcttaaattgaaatatgtataaaacatagaaagaaggacgttttaacatggaaaacacggttaaatatcgtaagtttatactccctatcgttgtaggtctccttatttgggcacttacaccttttaaaccggatgctgtggatccaacagcatggtatatgttcgcaatattcgtcgcgacaatcattgcttgtattacacaaccgatgccaattggggccgtctctataattggatttacaatcatggtactcgttggcattgttgacatgaaaacggctgtcgctggttttggtaataatagcatttggttaattgctatggcatttttcatttcgagaggatttgtgaaaacaggtcttggtagacgtatcgcacttcatttcgtcaaattatttggtaaaaaaacattaggcttagcatattctatcgtcggtgtagatttaattctagcgcctgctacaccaagtaataccgcgcgtgccggtggaatcatgttcccaattatcaaatcactttctgaatcatttggttcgaaaccgaaagacggatcagcacgcaaaatgggtgcatttcttgttttcacagaattccaaggtaatttaattactgcggctatgtttttaactgcaatggccggtaacccccttgcacaaaatttagcatctagcacatctaatgttcacattacatggatgaattggttcctagctgctttagttcctggacttatttccttaattgttgtaccttttattatttataaaatttatccaccaactgttaaagaaacaccaaatgctaagagttgggctgaaaatgaattagcgactatgggtaaaatcgctttagctgaaaaatttatgattggtatttttgtcgttgcgttaacactatggattgtcggaagtttcattcatattgatgcaactttaacggcctttattgcgttagcattgttattattgacaggcgtcttaacatggcaagacattttaaacgaaacaggtgcttggaacacattagtatggttctcagtattagtgttaatggccgaccaattaaacaagcttggatttattccttggttaagtaaatccattgctacaagtcttggtggcttaagctggcctatagtactggtcattttaatattgttctacttctattcacattacttatttgcaagttctacagcacatatcagtgcgatgtatgcagcattactaggcgttgccatcgcagccggtgcaccaccattattcagtgcattaatgttaggtttcttcggtaacctattagcttcaacaacacactatagtagtggcccagcgccgattctattctcttcaggttacgtgactcaaaaacgttggtggacaatgaacttgatcttaggtttcgtctactttattatctggattggtttaggatcactttggatgaaagtaattggtatattttaaaatatttaaattagcgctcgaatctcattgatttgggcgctttttaatttgtatttaaaatcaacctttgctaaatcaagactccctttttaaaatacgtttatcctttaaatcattgcgtgcttcactaaaaatctatataacgctttaaatcattgcgtaacatcacagaaaatacatttctgtataaacgcgcttcgttgattaacattacgtatgccctcataaatcatgaaattaaaaacaccttcgtttaaattcattttaagtgcgaattcaacgaaagtgatttatttcatatttaatgtttcaaatttatacagctgtcgctgttactgcacacatacctcagtctcaccttatcatgacacaaaggatattgaaaacacgtataattatctttcctcgtattttatagggtttttgcgaccggatgtttcttcaatttaatgtattgagaaagactatataacacaatacctgtccaaataaatataaacgtaattaattgatctatattaaaaggctctttgaaaacaaatatgccgagtacaaacattattgttggtccaacgtattgaataaatcctattaacgaaagtggaatacgttttgccccggctgagaataggattagtggtattgccgtaatagcaccagaaaataacaaccaaaatgatgacatgttcaatccaaatgacatctgatgttgctgccataaataaataacgtatattagtccagcaggtgcggtaacaatacattcaatcgtaatactgctgatggcatcaatatgtactacttttttcaataatccgtatgtaccaaaggataacgctaatataatagaaacgattgggaattctccaatcttgagcgtcatatataatacaccgatgaatgcgaataaaatagctagccattcaaatttattgaatctttcttttaaaaagataagtgcgagcaaaatgctaacaagtggatttatataataacctaaacttgtttgtaggacgtgaccgttcgttacagcccaaataaatgtaccccaatttaatgtaatgacatagcctgctacgacaatcgctaatagctgaatgggcttgcctaacaattgattcatatctcgttgaaatgcattgcgttgtttttgtccaaccgcgagtatgaaaatcatgaatattgctgaaaatataatacgaaaggctaaaatttcaaatgcgcctatttcatcaacgaactgccaatatataggtagtattccccacagaatgtatgcactgagtgctaaaaatataccttttttatattctgtattcacttacatacctccttactctcccaaatttttaacatgttacgctcacttggttatgctaatataacgattttactaataatatttcgataaagatatcattttgtttatatttcccacatttattcaccaaccactaaacaatattaattttataaataattctgtacaaatcagggtatattgccagaaagactaccatacaacataaaggatggatacaaatgactttacctaaaattggaaagcctgcaacacgcgcgctaaattcacaaggtatatacacattagaagcagtatcacaatatacgaagtcatctctaatggagatgcatggcgttggtcctaaagctatatcaatattggaacaagctttatttcagcaccaactacattttaaaacggaagttcagtcatcattaccttttaagttaacaggagatgtgtcatgcaatcatgcgcctaaacgtcaacaaatgatagattttatagttgctacagcagcattagatattgaattattacgttcactggttacaacagaatttatttggtctgtccctggccgctttgacatatacggacctcaaatattaattcaagaactatctaatcattacaatcaggttgctagtctcaatatccattccagcatcacacatgggtgcttaggttccatgcatggtattgaaatattaaaaactggtaaagagattcattttgctcatttttttgaatttgaaaatcataaaaaggatgccaagttaagcaaagtgacatcttacattgttgttggttaatttatcaaattatatatatcgcaaaaaaatcttttgtggttacatgtatattgttatataacaaataatttggcataacatttttgttatatgaacacttattactagagtgcccattgaacatacagtatgattaaatatcatgttatgaaagaaggatatattttgactgtttttaaaaatgagcgcttaagctggttaccatacatagctattgtcattttgttacacgttattgggtttagttttttatggattgctggaaaagaccatcatatcttatttggtatggggattcttgcatatacattaggtttgcgtcatgcatttgatgcagatcacattgctgcaatagataatacggttcgcaaattattacagcaacgcaaagatccatctggtgtgggtttctatttttcaattggacattcatctgtcgtatttttaatggctgtttttttaggggtatctgtaaaatgggctaaagatgaattaccgcatttccaagatattggtggaacgattggtacactagtttcaggtttctttttagtgcttatcggtgtgttgaatctaattattttaatctctttaattaacttgttcgctaaattacgtcgtgaacacattgaagaagctgaagtcgatgcattacttgaatctagaggattggtttctcgatttgtaggaccttatttcaaattaatcacgcgtagttggcacgtattgccacttggctttttatttggacttggttttgatacagctagtgaaattgcgttactcgctctttcttcaggcgcatcacaacaagccatttcgtttatcggaatcttatctttaccaattttattcgcatcaggtatgagtttattggatacattagatggtgttgtaatgaagtatgcctataattgggcattcttcaatcctattcgcaaaatctattacaatataacgattactgcgatatcagtcatggcagcattagtgattgggatgattgaattgctacaaattcttgctgataagctagatttacatggtgcgttttgggcattcattggttcgatcgaatttgattatttaggctatattttagttgcattatttttaattacttggcttatttcaagtttaatttggaagtttggtcgcatagaacacaaatggtctaaataaagtaacttgtcttgcaactacctttgtattgttgcatttttagacaccctgcacacttcttccattatgctacgctctcagtagtcatctttaaatcgtttcttttagagatgacttcattttgagagcgtatttttctatttaaaatgtatttatccaaaattcaatgctttcgaatttaaaatttcagtatttctgtttaaaatttaattataatctttaatacaggaggcgctatgcttatgaatattgcgaagttagagaattatttacaaattgattcatctcgttataatcgaccgagtattgaagcattaaattattatgcaacacgttttatgttaactgtaccttttgaaaatattgatgttcaaaatagtaagcctatatctataaatatcgatgcactttttaataaaattgttcatgataaacgtggtggtttttgttatgagttaaatacatttttcaaagcctatttacaacaaaaaggatttaatcctgcattaatgtcagctactattcacacacccggtggcggtcgtagtctgaacggttcacatgcttcacttgttgtttctataaatgatgtattctatgtaactgatgttggctttggagacttacctatacatgccattcctattacttcatctgagcatacacaaccaattactgatatcagtggtacattccgcgctatttttaacaacgaagacaaggatattttctatgttcaaaaattcgaaaatgatcattggcatacaaaatatgaagctgaattcaaacctaaacaaatagaagattttaatagcaacatcgaatataatcaaaccaacccagattcaatatttgtacagcatttattaattacaatgccacaatcatttggccgtgctacaatgtctgaaaatcatttaactttaacaaggaatggtagctcagaaaagttagctgtcactaaaaataactataaacattttttagaaaaatattttggactagatataactattaatcgtattgaaaaacaataatagtaaaatataaaaatatgggcgtatcttacttattgtaggtagcgccccgtttttatgcttcataaacacaacaaaaaggatatgacacaaacttcatgtcacacccttcttttgaaccgcttcattttacttaagcaagtgcatctacaacataaatgacacctacgaatacaaatgcaatagcaatcatcgtcgaaataaagacgatacccattaatggattaaataataaaatgacaccgaaaacaatacctaataaattaaaaatcactgaaattagttttaagctaccactacccgtaaacgtaaataatcctgcaatagaactaaaaataaaccagaatgcaaacatgtagataaaaaatgccgagctagcgccaacattaaaaatgacaataagaccaaagagaatatctacaatccccataaacagaatccaattttggttaccacctactaaagcttttgcttttctacggtaaatgatttgaatcacaccgttaattaatacaaacagtccaatcaaccaggtaatagcataaaaattttcaattggaaatgtaaaaataacgactgccaacattaataataatacacccattattaaactagaccatttaataccttggtttccttttgccataacaatcaattcctttcaaataaagccctcttttaatttttacaaaaaatttattatacaataattaaattcccttttctcaatttacacaaacatcatcacttagaaagcaccattgcttttgtctaatatgtacgatgaatctgtatcctcactcaaaaatctactacgtagcgatagctttcaactctgtaaggttcaaacattgaattgtaagtttagataaaggctactactccaaacattatttaaaatgaaattaaatacaaaaggagtgagactatgacaatattatcagtgcaacatgtttcaaaaacatacggtaaaaagcacacatttcaagcacttaaagatattaactttgacatacaaaaaggcgaattcgttgcgattatggggccttctggatcaggtaagacaaccttattaaatgtactaagttcaattgaccaaatttctagcggtagcgtgattgctaacggacaagagcttaataaacttaatcaaaaagcacttgccaaattccgtaaagaatcattaggtttcatcttccaagattacagtattctgccgacattaactgttaaagaaaacattatgttacctttatctgttcaaaaaatgtcgaaggcaacaatggaagaaaattacaaagcgatcacgacagcattaggtatttatgacctaggaaataaataccctagcgaattatctggtggtcaacaacaaagaactgcagcagcgagagcatttgttcacaaaccacaaatcatatttgcagatgagccaacaggcgcactcgactcgaaaagtgcaaatgacttattacaacgtttggaagaaatgaataaatcgtttgatacaactattgtcatggttacacatgatccggttgcagcaagttttgcagaacgtgtcatcatgctaaaagatggccaaattcatacacaactttatcaggaaggacgttctaaacaggccttttatgaagacattgtacatcttcaatcagtattaggtggtgtctcaaatgacatttaaccatatcgttttcaaaaatttacgccaaaacttaaaacattatgcaatgtatttattttcattattttttagcatcgtcttatatttcagttttacaaccttacagtttactaaaggtgtaaataatgacgactcgatggccatcattaagaaaggtgctttagtcggatcaatatttttatttatcattattgtcatctttttaatgtatgccaatcatttattcgtgaaacgtcgtacacgtgaatttgcgctatttcagttgattggtttaacacgacaaaacattttgaaaatgttagcacttgaacaaatgattgtatttttaatcacaggtgttgtcggtgtattatgtggcattgcaggtgcacaattattgctttccatagtatctaaattgatgtcgttatcgattaacttatcgatacatttcgaacctatggcccttgttttaactattttcatgctaattattgcgtatgtactgattttatttcaaagtgctttatttctaaaaagacgtagtatcttatcaatgatgaaagactcaattaaaactgatgttacaactgcgaaagttacagttatagaagtcatttcaggcgtattaggtattgctatgattgcactaggctattatatggcgacagaaatgtttggaacatttaaagcactaactatggctatgacatcaccgtttatcattttatttttaacggtagtaggcgcctatttattcttcagaagttccgtgtcactaatttttaaaactttgaaaaaatctaaaaatggacgcgtatctattacagatgttgtatttacatcgtctattatgtaccgaatgaagaaaaatgcgatgtctttaactatcattgcaattatttctgcagttacagtaactgtattgtgtttcgcggcattatctaaatcaaatacagatcaaacccttacatctatggcaccaaatgaatttaacgtggtcgctactcaagatgctaaacaatttgaaactaaactaagccaacaacaaattacattttctaaaaatgcttacgaaactattactgtagataatgttaaagatcaggttattactttggaaaatggtagcgattcaggtcgcacgaattctattttaagtgcaaataacaagttaacaggcaacaatgccatcattacaaatacaaaatcgctgcctaacattattaatatccatttaaacaaagatttagtagtaaaaggtactaagaatgaaactttccgtgttacacaagaagacaaaggtaaggtttatcctttaaatctaagcttcaactcacctgtcatcgaagtaagtcctgaaaagtatcagcagttgaaaacacaaaataacgttcatactttttatggatatgatattaaacaaacatcacaaaaggaaaaagctcaaacaattgcaaaacagtttggagacaaagtcatcacgtatgatgaaatgaaaaaagaggtcgatgctactaacggtattctaatatttgttacatcatttttaggattagcatttttagtagcagctggatgtattatttatattaaacaaatggatgaaactgaggatgaactaagtaacttcagaatattaaaacgcataggctttacgcatacagatatgcttaagggattattattaaaaattactttcaacttcggtttaccattattgattgctatattacatgcagtattcgccgcaatagcatttatgaaattgatgggtaatatttccttcatgccggttattgtagtaattgttgtatacacactcatttacattacttttgctttaattgcttttgtacattcaaacaaattgattaagaaaaccatttaacacttatgattaaaagatgcttcattgagattttgattttaagcaatgcagtataactattaactgatttataaaaaaggagagattgaatcatgaaatttagagaattagtaaaacaatcatacgaggatttgaaaaatttgactgtaacttggtataacgtcattgctttagcaatgattgttattgtcttaagcgtagttacaacaccaattataggtattccagctggtttattaggtggcgcctattatttaaaacgtcgtgaagaaaaaggcaagtaagcacattccatcggtatagaacattgctatgacctttcaagtcagattttaatatcaacaagtagcgtttatcgctgcttgttttttatggattgcttataaaatcatcatgtttaaacgatatgtcactttgaaaactagcaaacaccataaaagactacaatttttttatttttataaacccctttaaatcaacgtttctaaggtttttaaaaatcttttttaatttattttcaaaaaacactgtacattatgccaatatgagcgtatagttggtcttacgtaataaaagctcgtgaattaaattgtagtgtatttgtttagaatatcctcttttttagttatgaatttgttacaaatattaagtgcaaaagcacatggaggttttctatatgaataacggtacagtaaaatggtttaacgcagaaaaaggttttggtttcatcgaacaagaaaatggcggagacgtattcgtacatttctcaggtatcgctagcgatggctacaaaactttagaagaaggtcaaaaagttactttcgaaatcactgaaggtcaacgtggagaccaagcagttaacgtacaaactgtttaatcttacaaaataaaacgactcattataaatgaatcgctttgattaccaacaaggttctaaatcttgttggtatttttttatgctattttggataatatgagacaatacgatgatgatttataaaaacttatttgccaaatacacactaaggaaaattatgaggctgagtataccaattactgatataatagaaagcgcatttgtcatcgtatttctagctttagtcgtttgtacttcactaggatcttttccattcataaaagcaacaattcgatcgtagttgtccattttatgcactttttttaaatcttctattttcatagatgcataaaaacctattcccaaaatgattgccaccgttacaccccaagtccaattccaataaacaactaaaggtcccattaaaattgcagctaatgtcatgaaaataagcatcacatatgtccataagttaagacttcgttgcgctttaatatcaggtacaaatggaatggtcccttttactaaatcatctaaagttacattgaacaattcgcacatcattaataagttatgtatgtctggtaagcttttgtcattttcccaattagaaatactctgcctagatacatataacttttcagcaagatattcttgtgaataaccatctcgttccctatattttttaatttgtttactcagattcaattacatacgcctccagtcaattagtacaatcattacaatcagactatcagataaacttagttaaagtcacctttatgattgactaaatgttttgacatacgacaacatcagggtttgaagacttcctcaagacagacctgtatgattacgcgcttgtaattttctcaatgccaacttgaatttcatttattaatgatgcaacttttccatgctattcaatgcttgcgaagttagtcctatttaagagattacgttcacactatttactattcgattttccagctttccaactatgcttttctaatcttttttgtgctataaattctactgcttcaaaaatacatactgcactgatgaaccagcttaggaaaccaacaacaatgctaatcaaccacatgtgcgtcatatgtaacatcatccatgtaactaaaatacaaactaatacccctgtcataccaaacactgcgccacgacttacatgcacagcgactttatcaccatattgcatacctgtaataaacatagacactaaaaatactgccggaaacgttgcaaatataccgccaaattctttccaaggtagtgttacagatacaatataacttaataatactgcaaatccccccacaaaaaatttcattaatgttaatttcatgatgttctgcctccaaaaatttattacttaataactgaatacaactaattatcacgcattttccaaactataaatgtctaatactgaatattgcaagggaaataacaaaccaacaaacaactgtgaatattgcgcctttccgataacctttatgcttaatatagagagatgtcaaaaatacagttaatatacaagacagaataccgacaattgctccagtactaagattcatcgacatctccactaattgtgtaccacgatgatccaaagctaatgcgataatagccgcaagaaagactgccggcatagtagctataatacctcctaacttaccacctaccttatcagcaataattgaagctaatgcaacagcgataccaccaatgacaaaatgaagtattgcacttccaattgaaaacatcttcaacgtacctttctataattaattcaatacaaaacgtatcattcacacaaagtgtaaaacttaaattttctactgtaaaggcaactcaagcgatgttcataaagctttcatgatactttcataaactagcaataaagggttcaaatgaaggtatatccagctcaaattattgaaaattaccattaactgtaattttcaaatcaacatataaatataaatttttatgtttcacgtaaaacaaaaaaagacaaagctgttatgatcttagctttgtcttttatgtgttagtcatcatgtatacgacatcctactactaacgtttatatattcgaatttttatttcataataatcttcatgatctttgtctttatgctcaacatgtagtcctgtttgttgaatcgcttggatacttttgcctacctcatctcgtgcttgagtgacatcttgtgcaaagcgaaggttttgtgctttgactttttcgggcccagttttttggcgtactctatcttcagtctgtttcacatttagtttttgtgcaatgacttgctcaatcaacgcttcttgttcactatcagacaatgataataccgctctcgcatggcgttcagtaattttaccttctcttaagcgaagtagtactttcggcgccaacttcaataaacgcaacttatttgcaataaagctttgacttttacctaaactttttgccaattcactttgcgttgtatcaccaatttccaataatttcttataggcttccgcttcttcaacaacagacaaattttctctttgaatattctcaattaatgcaacaacagccgtctcttcatcatccatatcacgaataataacgtctgcttgaggtaaatttagtgattgtattgctctaaatcggcgctctccagcaataatttcaaacatatcttcttcaatcggtcttacaacaataggctgtaataaaccatgttcatgtattgattcagcaagttctttaattttatttggttcaaacacctgtcttggttgataacggttgggaacgatacgttcaatttgaatggattcaacattactattgcgatcttcttcaatatgtccaatgatgtcatctttgtttttcaaaccaaataattttgaaaaaggttttttcattatccattcgctccttttatgttagttgtaaaggattatgcattatttttcaagtaaaggagtcttattaggcgtccctggttttcttggatactttttcggcgtctgtctttttttatcaataatgaacatctggcgctctccagcatcttctggcaattcgaaagtatgtgtttctgtaacattaccacctaacacactaattgcaaattttgcttcttctaattcttcttcaccttttgaagattttaatgcaacaaactgtccaccttttttaactagcggtaaacacaattcacttaacacggataatctagctactgctcttgcagtaacaacatcataagactccctgtagacacccttaccaaatgtttctgctctatcgtgtataaagctgacatcctgtaattgtaattctgacgctaaatggtttaaaaattgaatacgcttatttaatgaatcaacaatcgtcacttttaactgcggaaacattatttttaacggaatacttggaaaaccagctccagcgcctacatcacatatacttataggctgattaaaatcaaaataaaaactaggtgcaatggaatcataaaaatgtttcaaatatacatcgtgttcatctgtaatacttgtcaaattcatcttttcattccattcaacaagtaaacgataatatgtttgaaactgttgtttttgagtctcagttaattgaatattatgttcttttaattgttctgctaaccattctacagtcattagtcactcaccctttggagtttaccttgttctaagtaaatcaataatatagatatgtctgctggatttacccctgatattctagaagcttgtgcaatatttaaaggttttacttctgataatttttctcgcgcttcagtcgccaaactatcaatcttactataatctaagtcttctggaattttcttctcttccatacgcttaactttctcaacttgttgtagtgatttattgatataaccttcatattttgtttgtatttctacttgttcttcaacatctgcattcaattgatgttcttcttctaaaatttctaaaattatatcgtaagtcatttcaggtctgcgtaataaatcgatagctaaaataccatcttttaagcgagaaccaccatgttgttcaataatcgcttgcgtatgttcgtttggtttaatacgaatatctgataaacgcttaatttccgcatcaatttgctgacgtttttcattaaaacgtgcatatcgttcttcagaaatcataccaagttcatatcccatatccgtcaatctcaaatcagcattatcatgacgtagtaacaaacgatattctgcacgtgatgttagtaaacgataaggttcattagtacctttagttacaagatcatcgattaagacaccaatatatgcatctgaacgacttaatatcttttcgcctgtgtttaacactttacctgcagcgttaatacctgccatcaatccttgtcctgctgcttcttcataaccagatgtaccattaatttgacctgcagtatataagtttttaatcattttcgtttcaagtgtaggccataactgcgttggcacaatcgcatcatattcaattgcgtagccggcacgcatcatatctgctttttcaagacctggtatcgtctctaacatttgacgttgcacatgttcaggaagacttgtagacaatccttgcacatatacttcatttgtattacgaccttcaggctctaagaaaagttgatgtcgcggcttatcattaaatcgaacaaatttatcttcaattgaagggcaataacgtggcccggttcctttaatcatccctgaatacattgcagatagatgtaaattatcatcgataactttgtgtgtttcagcattagtatacgttagccaacatggcaattgatctaatatatattctgttgtttcaaagctgaatgcacgacctacatcgtcacctggttgtatttcagtcttcgaatagtcaattgtttttgaatttacacgcggtggtgtacctgttttaaaacgaacaatatcaaaaccaagttctcttaaattgtctgataatgtgattgatggtaattggtgatttggtccacttgaatacttcatattacctaaaatgatttcaccacgtaaaaatgttcccgttgtaataattactgctttagataaatactctgtaccaatatttgtacgtacacctttaacttcattatcttctataataagttcgtctaccataccttgcattatatgcaaattttcttcatcttcaatcacgcgtttcatttcttgttgataaagtactttatctgcttgcgctcttagtgctcttacagcaggtcctttacctgtatttaacattctcatttgaatgtgtgttttatcgattgtttttgccatttgtccacctaaagcatcaatttcacgaacaacgatacctttagctggtccacctacagatgggttacatggcataaatgcaatattatctaaatttattgttagcattaatgttttagcaccacgtcttgcagatgctaaacctgcttctacacctgcatgtcccgcacctataacgattacatcatattcttgaaccacaatataaacctccttatttgatatcttactagccttcttaagacggtattccgtctatttcaattactatttacctaagcagaattgactgaataactgatcgatgagttcatcacttgcagtctcaccaataatttctcctaatatttcccaaattctagttaaatcaatttgtaccatatccataggcacaccagattctgctgcatcaatcgcatcttgtatcgtttgtcttgcttgttttaataatgaaatatgtcttgaattagaaacataagtcatatcttgattttgtacttctccaccaaagaacaaatctcgaatttgtatttctaattcatcaataccttcttgttttaacattgaagtttgaattaatggcgtatcacctatcatatctttaacttcattaatatctatgttttgctctaaatccattttattaacaattacgattacatcttcatttttaaccacttcatataatgtgtaatcttcttgagtcaatgcttcgttattgtttaatacaaataaaattaagtctgcttggctaagagcctttctagagcgttcaacaccaatcttctctactatatcttctgtctcgcgtataccagcagtatcaactaatcttaatggcacgccacgaacattgacgtactcttctaagacatctcttgtagtacctgctacctcagttacaatcgctttattatcttgtattaaattatttaacatcgatgatttacctacgtttggtttaccaacaataactgtagataaaccttcacgcataattttaccctgcgcaccggtatctaataaacgattaatttcctgtttgatttctttagactgctctaaaagaaattcagtagtcgcatcttcaacatcatcgtattcaggataatcaatattcacttccacttgagcgagtatctctaatatagattgacgttgttttttgattaagtcacttagacgaccttcaatttgattcatcgcaactttagaagctctatctgttttcgagcgaataaagtccataactgcttcagcttgagataaatcaatacgaccattcaaaaaggcacgttttgtaaattcacctggctcagccattctagcgccatatgtcatagtaagttccagcactctattaatcgttaaaataccaccatgacaattaatttctataatatcttcgcgtgtaaatgtttttggcgctcttaacacagacaccataacttcttcaaccacttctttagactctggatcaataatatgaccgtaattaatcgtatgtgatggaacatcatttaaaagatgttttcctttatataatttgtcagcaatttcaacggcttgcggtccagacaatcgaacaattccaattgccccttcacccattggtgttgaaatactcgtaattgtatctaaatccatattgctactcgcctccttcaacgatgtgaatacattttaaagtaagttattataaccctaaggtcagtcttacgtttgtctgaggtaagacttcgggatgcgttgagtggttaatgttttccttcccctaccctatccttacttaatctttttattaaaaactttggcaattttaagtacgtgctcaagactattctgtatttgtaaagtcgtcatatctttagctggctgtcttgctattacaataatatctttggccaatatatgcgacttatgtactttgaaattttcacgtattgctcttttaatcttgtttcttaacactgcattacctagttttttagaaacactaatacctaagcgaaaatggtctatttctttattattacaagtgtatacaacaaattgtctgttggctacagaatgaccttttttatatattctctgaaaatctgcattctttttaattcggtaagctttttccaataacatcactcgcttatttatcgtttttatttgaagctatatttaaacttctattgagcttataacataaatttctatttattcttaatttaaacgaaaaaaaagatcactgatgagtcagtgatcttatgcagataaaactttacggcctttacgacgacggcgcgctaaaactttacggccattttttgtgctcatgcgttttctgaaaccatgaactttactatgtttacgtttatttggttgataagtacgttttaccatgcaaaacacctccatctttatacagttatctaatataccagattatgcagactctgatcactttaatagataagattttgcgtttcttagattaaaattctcgtattagctcattgattatctagtcataattcaagcaactactacaatataacaaaatcctttttataacgcaagttcattttatactactgctcaatttttttacttttat
